(19) United States
(12) Patent Application Publication
(10) Pub. No.: US 2022/0387567 A1
(43) Pub. Date: Dec. 8, 2022

(54) COMPOSITIONS AND METHODS FOR TREATING DISEASES AND DISORDERS ASSOCIATED WITH ABERRANT REGULATION OF PROTEINS

(71) Applicants: University of Virginia Patent Foundation, Charlottesville, VA (US); The University of Birmingham, Birmingham (GB); The General Hospital Corporation, Boston, MA (US)

(72) Inventors: Donald F. Hunt, Charlottesville (US); Jeffrey Shabanowitz, Charlottesville (US); Keira Mahoney, New Haven, CT (US); Jennifer G. Abelin, Boston, MA (US); Mohammad Ovais Azizzanjani, Palo Alto, CA (US); Paisley Trantham Myers, Irmo (US); Stacy Alyse Malaker, New Haven, CT (US); Andrew Norris, Oilville (US); Jennifer Hitchcock, Midlothian, VA (US); Xi Peng, Charlottesville (US); Negin Ghafourian, Charlottesville (US); Mark Cobbold, Winchester (US); Sarah Penny, Birmingham (GB); Nico Buettner, Birmingham (GB); James M. Heather, Boston, MA (US)

(73) Assignees: University of Virginia Patent Foundation, Charlottesville, VA (US); The University of Birmingham, Birmingham (GB); The General Hospital Corporation, Boston, MA (US)

(21) Appl. No.: 17/441,662

(22) PCT Filed: Mar. 23, 2020
(86) PCT No.: PCT/US2020/024348

§ 371 Date: Sep. 21, 2021

Related U.S. Application Data
(60) Provisional application No. 62/876,700, filed on Jul. 21, 2019.
(60) Provisional application No. 62/821,468, filed on Mar. 21, 2019.

(51) Int. Cl. A61K 39/00

(52) U.S. Cl. CPC A61K 39/0011; A61K 2039/57; A61K 2039/585

(57) ABSTRACT

Compositions that include anti-cancer, anti-tumor, and anti-microbial infection peptides are provided. In some embodiments, the compositions include 1-10 or more synthetic peptides that are between 8 and 50 amino acids long and include an amino acid sequence as disclosed herein. Also provided are in vitro populations of dendritic cells that include the compositions, in vitro populations of T cells capable of being activated uponbeing brought into contact with the populations of dendritic cells, antibodies and antibody-like molecules that specifically bind to complexes of an MHC class I molecule and the peptides, methods for using the disclosed compositions for treating and/or preventing cancer and/or microbial infections, methods for making cancer vaccines and anti-microbial vaccine, methods for screening peptides for inclusion in immunotherapy compositions, methods for determining a prognosis of a patient with a cancer and/or a microbial infection, kits that include the disclosed peptides, and methods for treating and/or preventing diseases, disorders, and/or conditions associated with hyperphosphorylation of MHC I peptides and/or MHC II peptides, inadequate PP2A activity, and/or undesirable CIP2A activity.

### CROSS REFERENCE TO RELATED APPLICATION

[0001] The presently disclosed subject matter claims the benefit of U.S. Provisional Patent Application Ser. No. 62/821,468, filed Mar. 21, 2019, the disclosure of which incorporated herein by reference in its entirety.

### GOVERNMENT INTEREST

[0002] This invention was made with government support under Grant No. A1033993 awarded by The National Institutes of Health. The government has certain rights in the invention.

### BACKGROUND

[0003] Cells in the human body communicate their health status to the immune system by degrading cellular proteins and presenting fragments of each on the cell surface. The major pathway involves the proteosome, a multi-enzyme particle, not unlike a garbage disposal, that converts the linear protein chain into a mixture, dominated by 9-12 residue peptides. These are then transported into the endoplasmic reticulum via transport associated proteins (TAP). There, one or more chaperone proteins load them onto class I MHC molecules, 47 kiloDalton (kDa) glycoproteins coded by genes in the major histocompatibility complex. A third protein, beta-microglobulin (12 kDa), stabilizes the resulting complex and the trimer is then transported to the cell surface. Appropriately educated, cytotoxic T-lymphocytes (CTL; CD8⁺ T-cells) bind to the class I MHC molecules on the cell surface, sample the peptides being presented and lyse those cells that express new peptides, as a result of viral, bacterial or parasitic infection, tissue transplantation or cellular transformation. Evidence that the immune system plays an active role in the surveillance of tumors includes observations that (a) immunosuppressed transplant recipients display higher incidences of non-viral cancers than appropriate control populations; (b) cancer patients can exhibit spontaneous adaptive and innate immune responses to their tumor; (c) the presence of tumor infiltrating lymphocytes can be a good indicator of survival; and (d) many healthy blood donors have central memory T-cells that respond to and kill cells that present the tumor specific class I and class II phosphopeptide antigens.

[0004] Identification of cellular antigens is an important goal because these peptides become potential candidates for vaccines and other cancer treatments such as adoptive-cell therapy (ACT). Unfortunately, sequence analysis of antigenic peptides is a daunting task. Each cell expresses several hundred thousand copies of up to six different class I MHC molecules. Three MHC molecules are inherited from the mother and three from the father. More than a hundred different class I MEW molecules exist in the population at large, but more than eighty percent of the population has one of five common alleles. These are termed HLA-A*0201, HLA-A*0101, HLA-A*0301, HLA-B*0702, and HLA-B*4402. Cells synthesize more than ten thousand different proteins each day and it is expected that one or more fragments from most of these will appear on the cell surface in association with an MEW molecule. Using mass spectrometry, the number of different peptides presented by a given type of class I MEW molecule has been estimated to be between 6,000 and 10,000. Since each cell can present up to 6 different class I MHC molecules, 36,000 to 60,000 different peptides can be displayed on the cell surface at any one time.

[0005] CTLs lyse infected or diseased cells that display as few as 5-50 copies of a particular peptide antigen. On 10⁸ cells (100 ml of cell culture), this copy number corresponds to 1-10 fmols of an individual peptide. Diseased cells continue to display the usual number of self peptides along with a small number of additional peptide antigens characteristic of the disease state. The analytical challenge is to be able to identify these antigens in a mixture containing as many as 10,000 self peptides and then sequence them at the low attomole-low femtomole level.

[0006] At present, there are several very attractive approaches for immunotherapy of cancer. In 2011, a lentiviral vector that expressed a chimeric construct that contained an antibody receptor for the B-cell antigen CD19 coupled to the CD137 (a costimulatory receptor in T-cells) and CD3-zeta (a signal-transduction component of the T-cell antigen receptor) signaling domains was described. When this vector is transfected into CD8⁺ T cells, they recognize and kill cells that express the surface protein antigen CD19. Remarkably, late stage chronic lymphocytic leukemia (CLL) patients were cured of their disease in a matter of weeks by this approach. Unfortunately, the treatment also wiped out normal B-cells and left the patients with compromised immune systems.

[0007] To date, the most effective treatment for metastatic melanoma has been adoptive cell therapy (ACT). In this approach, tumor infiltrating lymphocytes (TIL) are isolated from resected tumors and expanded to large numbers (1×10¹⁰ cells) in vitro. After the patient's immune system is ablated by a combination of chemotherapy and total body irradiation, the TIL, plus the cytokine interleukin-2 (IL-2), are re-infused and allowed to search out the tumor in the absence of CD4⁺ Treg cells. Objective (tumor shrinkage) and complete responses for this therapy in a recent clinical trial of 25 late-stage patients with metastatic melanoma were 72% and 16%, respectively. Efforts to improve this technology are in progress and involve transfecting patient CD8⁺ T-cells (prior to expansion) with high affinity receptors for specific melanoma associated Class I MHC peptides (MART 1, etc.).

[0008] Striking data on the treatment of cancer with immune-mobilizing monoclonal T cell receptors (ImmTACs) has recently been published. Here, the approach is to use phage display technology to engineer a specific CD8⁺ T cell receptor (extracellular portion) so that it has antibody-like affinity (i.e., picomolar instead of micromolar affinity) and then couple it to a humanized CD3-specific scFv sequence that will trigger killing by any polyclonal T-cell in the vicinity of bound receptor. Outstanding results have been obtained on melanoma in vitro with a receptor that recognizes the class I peptide YLEPGPVTA (SEQ ID NO: 3222) from the protein gp100 on HLA-A*0201. Use of the ImmTAC for YLEPGPVTA (SEQ ID NO: 3222) is presently being evaluated in a phase II clinical trial on melanoma patients.

[0009] Another approach to immunotherapy of cancer is based on the finding that human tumors harbor a remarkable number of somatic mutations. Class I MHC peptides that contain these mutations (neoantigens) should be recognized as non-self and trigger T-cells to kill the cells that present them. To find these neoantigens, individual patient tumors are subjected to whole exome sequencing and a combination of prediction algorithms, analysis of eluted MHC peptides by mass spectrometry, and large scale peptide synthesis is employed to define which mutated peptides are presented by specific HLA alleles. The result is a personalized vaccine for each cancer patient. Unfortunately, to date very few of these mutated antigens are shared by multiple tumors.

[0010] Also of note are recent cancer therapies based on antibodies that recognize cell surface proteins involved in down regulating the immune response to tumor antigens, thus preventing collateral tissue damage and autoimmune disease. Ipilimumab targets cytotoxic T-lymphocyte associated antigen-4 (CTLA4) and up-regulates the amplitude of the early stages of T cell activation. It received FDA approval for treatment of melanoma in 2010. Another immune-checkpoint receptor programmed cell death protein 1 (PD1) limits the activity of T-cells in the peripheral tissues and is also highly expressed on Treg cells. An antibody directed to this receptor blocks immune suppression. Objective responses were observed in a recent clinical trial with this antibody on patients with melanoma, non-small cell lung cancer, and renal cell cancer. A recent treatment with anti PD1 antibody cured former U.S. President Carter of metastatic melanoma.

[0011] There is a long felt need in the art for compositions and methods useful for treating and preventing diseases and disorders associated with aberrant expression and regulation of class I MHC peptides, particularly phosphopeptides, as well as aberrant regulation and post-translational modification of other proteins. The presently disclosed subject matter satisfies these needs.

### SUMMARY

[0012] This Summary lists several embodiments of the presently disclosed subject matter, and in many cases lists variations and permutations of these embodiments of the presently disclosed subject matter. This Summary is merely exemplary of the numerous and varied embodiments. Mention of one or more representative features of a given embodiment is likewise exemplary. Such an embodiment can typically exist with or without the feature(s) mentioned; likewise, those features can be applied to other embodiments of the presently disclosed subject matter, whether listed in this Summary or not. To avoid excessive repetition, this Summary does not list or suggest all possible combinations of such features.

[0013] The presently disclosed subject matter discloses in part that loss or dysregulation of PP2A expression or activity is associated with diseases and disorders due to hyperphosphorylation of peptides and that other disease and disorders are associated with aberrant methylation on Arg and Lys or O-GlcNAcylation on Ser and Thr. In some embodiments, the presently disclosed subject matter provides compositions and methods for determining whether a disease, disorder, and/or condition is associated with hyperphosphorylation of MHC I peptides or other peptides or proteins or aberrant methylation on Arg and Lys or O-GlcNAcylation on Ser and Thr. In some embodiments, the presently disclosed subject matter provides targets for treatment and methods for identifying those targets.

[0014] The presently disclosed subject matter provides, inter alia, Class I MHC phosphopeptide neoantigens and compositions and methods for identifying such antigens, sequencing the antigens, and treating subjects with aberrant regulation of the antigens. In some embodiments, they are post-translationally modified. In some embodiments, Class II peptides are identified and used.

[0015] The presently disclosed subject matter provides compositions and method useful for preventing and treating diseases, disorders, and/or conditions, in some embodiments cancer and in some embodiments and microbial infections, which are associated with aberrant expression, aberrant regulation, and aberrant post-translational modification of peptides or proteins, including class I MHC peptides. In some embodiments, there are two or more problems or defects in aberrant expression, regulation, or post-translational modification in a subject. In some embodiments, the peptides are phosphopeptides. In some embodiments, aberrant expression of a class I MHC peptide is in a cancer cell or a microbial infected cell, including a bacterial infected cell or a virus infected cell. In some embodiments, the subject has been infected with a bacteria or a virus, or more than one bacteria, virus, or a combination thereof.

[0016] In some embodiments, the virus is selected from the group consisting of HIV, HPV, HCV, HBV, EBV, MCPyV, and coronavirus, which in some embodiments can be SARS-CoV and/or SARS-CoV-2 and/or MERS-CoV.

[0017] In some embodiments, the bacteria is selected from the group consisting of H. pylori, Fusobacterium nucleatum, and other bacteria of the gastrointestinal microbiome. In some embodiments, the aberrant regulation is of a signaling pathway.

[0018] In some embodiments, post-translational modification includes, but is not limited to, phosphorylation, methylation on Arg and Lys, and O-GlcNAcylation on Ser and Thr.

[0019] In some embodiments, viruses or bacteria cause infected cells to present multiple class I MHC phosphopeptide neoantigens.

[0020] In some embodiments, the presently disclosed subject matter provides compositions and methods for detecting and for preventing and treating diseases and disorders where PP2A has been inactivated or has decreased effects or activity. In some embodiments, there is aberrant regulation of PP2A. In some embodiments, the aberrant regulation is inhibition of PP2A activity, expression, or levels. Compositions and methods of the presently disclosed subject matter are useful for reversing or inhibiting diseases and disorders due to hyperphosphorylation of peptides and other disease and disorders that are associated with aberrant methylation on Arg and Lys or O-GlcNAcylation on Ser and Thr.

[0021] Many phosphopeptides: (a) are uniquely expressed on tumors and not on normal cells, (b) are found on multiple types of cancer, (c) are recognized by central memory T-cells in PBMC from healthy blood donors, and (d) trigger killing by cytotoxic T-cells.

[0022] The presently disclosed subject matter provides compositions and methods for the treatment of disease that targets Class I and/or Class II MHC phosphopeptides that are in some embodiments uniquely presented on the cell surface because one or more phosphatases in the diseased cell are inhibited.

[0023] The diseases and disorders that can be prevented or treated by the compositions and methods of the presently disclosed subject matter include, but are not limited to, cancer, Alzheimer's disease, and infections, including, but not limited to, bacterial infections and viral infections. Cancers that can be prevented or treated include, but are not limited to, leukemia (several types, including, for example, AML, ALL, and CLL), melanoma, breast, ovarian, colorectal, esophageal, and hepatocellular cancers.

[0024] Many tumors that exhibit aberrant expression of class I MHC phosphopeptides or class I MHC peptides are known in the art. See, for example, PCT International Patent Application Publication Nos. WO 2014/036562, WO 2014/039675, WO 2014/093855, WO 2015/034519, and WO 2015/120036; U.S. Patent Application Publication Nos. 2008/0153112, 2010/0297158, 2013/0259883, 2015/0328297, 2016/0000893, 2017/0029484, 2018/0066017, 2019/0015494, and 2019/0374627, and U.S. Pat. Nos. 8,119,984; 8,211,436, 8,692,187; 9,171,707; 9,279,011; 9,561,266; 10,281,473; each of which is incorporated by reference herein in its entirety, for useful peptides and methods. Other post-translational modifications are also encompassed by the presently disclosed subject matter.

[0025] In some embodiments, the presently disclosed subject matter provides compositions and methods for preventing and treating diseases and disorders where PP2A has been inactivated or has decreased effects or activity. In some embodiments, the loss or decreased levels of PP2A or PP2A activity results from loss of decreased levels of RB-1 effects or activity. In some embodiments, the loss or decreased levels of PP2A or PP2A activity results from induction or enhanced levels of CIP2A effects or activity. In some embodiments, the loss or decreased levels of PP2A or PP2A activity results in an increase in phosphorylation of class I MHC peptides and an increase in cell surface expression of the phosphopeptides.

[0026] In some embodiments, the loss or decreased levels of PP2A or PP2A activity results in neurodegeneration. In some embodiments, the loss or decreased levels of PP2A or PP2A activity results in hyperphosphorylation of a peptide such as Tau and is associated with Alzheimer's disease. In some embodiments, the presently disclosed subject matter provides compositions and methods to inhibit hyperphosphorylation of Tau or to reverse hyperphosphorylation of Tau that has been hyperphosphorylated.

[0027] Based on the discoveries presented herein, several types of treatments can be used where there is a disease, disorder, and/or condition associated with the loss or decreased levels of PP2A or PP2A activity. These include first identifying hyperphosphorylated or abnormally post-translationally modified peptides in a subject. Then, the peptides can be purified and used as immunogens and/or once identified can be synthesized and used as immunogens, and/or cells and/or tissues can be isolated and the peptides at least partially purified and used as immunogens. The presently disclosed subject matter further encompasses methods to restore PP2A levels or activity, to dephosphorylate any hyperphosphorylated peptides that resulted from inhibition of PP2A, etc.

[0028] In some embodiments, the treatment of the presently disclosed subject matter is an immunotherapy.

[0029] In some embodiments, the presently disclosed subject matter provides compositions and methods useful as a vaccine or as an immunogen for cancer or other diseases, disorders, and/or conditions.

[0030] In some embodiments, the presently disclosed subject matter provides compositions and methods useful as a therapeutic for treating cancer or as a vaccine for preventing cancer in a subject in need thereof.

[0031] In some embodiments, the presently disclosed subject matter provides compositions and methods useful as a therapeutic for treating a microbial infection or as a vaccine for preventing a microbial infection in a subject in need thereof.

[0032] In some embodiments, identified hyperphosphorylated peptides can be isolated or synthesized and administered to a subject as a therapeutic for treating a disease, disorder, and/or condition or as a vaccine for the disease or disorder. In some embodiments, peptides or proteins with other aberrant post-translations modifications associated with a disease, disorder, and/or condition can be isolated or synthesized and administered to a subject as a therapeutic for treating a disease, disorder, and/or condition or as a vaccine for the disease or disorder.

[0033] Several in vitro and in vivo assays can be used to demonstrate the effectiveness of the peptides of the presently disclosed subject matter and are disclosed herein or in the references cited herein below.

[0034] Various aspects and embodiments of the presently disclosed subject matter are described in further detail herein below.

### BRIEF DESCRIPTION OF THE FIGURES

[0035] FIG. 1 is a schematic of an exemplary method for isolating and analyzing modified peptides as per the presently disclosed subject matter.

[0036] FIG. 2 is a schematic of an exemplary methods for determining the sequencing of as well as the phosphosite of a phosphopeptide as per the presently disclosed subject matter.

### DETAILED DESCRIPTION

[0037] Phosphopeptide antigens are of considerable therapeutic interest because to dysregulation of protein kinase activity, normally tightly controlled, plays a prominent role in the hallmark traits of cancer. These include sustained proliferative signaling, evasion of growth suppressors, resistance to apoptotic signals, unlimited replicative potential, induction of angiogenesis, activation of invasion and metastasis, reprogramming of energy metabolism, and eventual evasion of the immune system. These considerations suggest that alterations in protein phosphorylation (also including O-GlcNAcylation and/or methylation) are likely to occur during malignancy. Without wishing to be bound by any particular theory it is hypothesized herein that Class I and Class II phosphopeptides produced by dysregulated signaling pathways in the tumor should not be found in a normal tissue such as the thymus or lymph nodes. As a consequence, tolerance (deletion of high avidity T-cells) to these antigens is highly unlikely. If the kinase or target protein is required for the transformation process, neoangiogenesis, metastasis, or another critical tumor function, tumor escape by mutation or gene deletion without compromising tumor survival is also unlikely.

### I. Definitions

[0038] Headings are included herein for reference and to aid in locating certain sections. These headings are not intended to limit the scope of the concepts described therein under, and these concepts may have applicability in other sections throughout the entire specification. While the presently disclosed subject matter has been disclosed with reference to specific embodiments, it is apparent that other embodiments and variations of the presently disclosed subject matter may be devised by others skilled in the art without departing from the true spirit and scope of the presently disclosed subject matter.

[0039] In describing and claiming the presently disclosed subject matter, the following terminology will be used in accordance with the definitions set forth below.

[0040] The articles “a” and “an” are used herein to refer to one or to more than one (i.e., to at least one) of the grammatical object of the article. By way of example, “an element” means one element or more than one element.

[0041] The term “about”, as used herein, means approximately, in the region of, roughly, or around. When the term “about” is used in conjunction with a numerical range, it modifies that range by extending the boundaries above and below the numerical values set forth. For example, In some embodiments, the term “about” is used herein to modify a numerical value above and below the stated value by a variance of in some embodiments ±10% and in some embodiments ±20%. Therefore, about 50% means in some embodiments in the range of 45%-55% and in some embodiments in the range of 40-60%. Numerical ranges recited herein by endpoints include all numbers and fractions subsumed within that range (e.g., 1 to 5 includes 1, 1.5, 2, 2.75, 3, 3.90, 4, and 5). It is also to be understood that all numbers and fractions thereof are presumed to be modified by the term “about”.

[0042] The terms “additional therapeutically active compound” or “additional therapeutic agent”, as used in the context of the presently disclosed subject matter, refers to the use or administration of a compound for an additional therapeutic use for a particular injury, disease, or disorder being treated. Such a compound, for example, could include one being used to treat an unrelated disease or disorder, or a disease, disorder, and/or condition which may not be responsive to the primary treatment for the injury, disease, disorder, and/or condition being treated.

[0043] As used herein, the term “adjuvant” refers to a substance that elicits an enhanced immune response when used in combination with a specific antigen.

[0044] As use herein, the terms “administration of” and or “administering” a compound should be understood to mean providing a compound of the presently disclosed subject matter or a prodrug of a compound of the presently disclosed subject matter to a subject in need of treatment.

[0045] As used herein, an “agonist” is a composition of matter which, when administered to a mammal such as a human, enhances or extends a biological activity attributable to the level or presence of a target compound or molecule of interest in the mammal.

[0046] A disease, disorder, and/or condition is “alleviated” if the severity of a symptom of the disease, condition, or disorder, or the frequency with which such a symptom is experienced by a subject, or both, are reduced.

[0047] As used herein, “amino acids” are represented by the full name thereof, by the three letter code corresponding thereto, or by the one-letter code corresponding thereto, as known to those of ordinary skill. The expression “amino acid” as used herein is meant to include both natural and synthetic amino acids, and both D and L amino acids. “Standard amino acid” means any of the twenty standard L-amino acids commonly found in naturally occurring peptides. “Nonstandard amino acid residue” means any amino acid, other than the standard amino acids, regardless of whether it is prepared synthetically or derived from a natural source. As used herein, “synthetic amino acid” also encompasses chemically modified amino acids, including but not limited to salts, amino acid derivatives (such as amides), and substitutions. Amino acids contained within the peptides of the presently disclosed subject matter, and particularly at the carboxy-or amino-terminus, can be modified by methylation, amidation, acetylation or substitution with other chemical groups which can change the peptide's circulating half-life without adversely affecting their activity. Additionally, a disulfide linkage may be present or absent in the peptides of the presently disclosed subject matter. The term “amino acid” is also interchangeably with “amino acid residue”, and may refer to a free amino acid and to an amino acid residue of a peptide. It will be apparent from the context in which the term is used whether it refers to a free amino acid or a residue of a peptide.

[0048] Amino acids may be classified into seven groups on the basis of the side chain R: (1) aliphatic side chains; (2) side chains containing a hydroxylic (OH) group; (3) side chains containing sulfur atoms; (4) side chains containing an acidic or amide group; (5) side chains containing a basic group; (6) side chains containing an aromatic ring; and (7) proline, an imino acid in which the side chain is fused to the amino group.

[0049] Synthetic or non-naturally occurring amino acids refer to amino acids which do not naturally occur in vivo but which, nevertheless, can be incorporated into the peptide structures described herein. The resulting “synthetic peptide” contain amino acids other than the 20 naturally occurring, genetically encoded amino acids at one, two, or more positions of the peptides. For instance, naphthylalanine can be substituted for tryptophan to facilitate synthesis. Other synthetic amino acids that can be substituted into peptides include L-hydroxypropyl, L-3,4-dihydroxyphenylalanyl, alpha-amino acids such as L-alpha-hydroxylysyl and D-alpha-methylalanyl, L-alpha.-methylalanyl, beta.-amino acids, and isoquinolyl. D amino acids and non-naturally occurring synthetic amino acids can also be incorporated into the peptides. Other derivatives include replacement of the naturally occurring side chains of the 20 genetically encoded amino acids (or any L or D amino acid) with other side chains.

[0050] As used herein, the term “conservative amino acid substitution” is defined herein as exchanges within one of the following five groups:
[0051] Small aliphatic, nonpolar or slightly polar residues: Ala, Ser, Thr, Pro, Gly;
[0052] Polar, negatively charged residues and their amides: Asp, Asn, Glu, Gln, cysteic acid and homocysteic acid;
[0053] Polar, positively charged residues: His, Arg, Lys; Ornithine (Orn)
[0054] Large, aliphatic, nonpolar residues: Met, Leu, Ile, Val, Cys, Norleucine (Nle), homocysteine
[0055] Large, aromatic residues: Phe, Tyr, Trp, acetyl phenylalanine

[0056] The nomenclature used to describe the peptide compounds of the presently disclosed subject matter follows the conventional practice wherein the amino group is presented to the left and the carboxy group to the right of each amino acid residue. In the formulae representing selected specific embodiments of the presently disclosed subject matter, the amino-and carboxy-terminal groups, although not specifically shown, will be understood to be in the form they would assume at physiologic pH values, unless otherwise specified.

[0057] The term “basic” or “positively charged” amino acid, as used herein, refers to amino acids in which the R groups have a net positive charge at pH 7.0, and include, but are not limited to, the standard amino acids lysine, arginine, and histidine.

[0058] As used herein, an “analog” of a chemical compound is a compound that, by way of example, resembles another in structure but is not necessarily an isomer (e.g., 5-fluorouracil is an analog of thymine).

[0059] An “antagonist” is a composition of matter which when administered to a mammal such as a human, inhibits a biological activity attributable to the level or presence of a compound or molecule of interest in the mammal.

[0060] The term “antigen” as used herein is defined as a molecule that provokes an immune response. This immune response may involve either antibody production, or the activation of specific immunologically-competent cells, or both. An antigen can be derived from organisms, subunits of proteins/antigens, killed or inactivated whole cells or lysates.

[0061] The term “antigenic determinant” as used herein refers to that portion of an antigen that makes contact with a particular antibody (i.e., an epitope). When a protein or fragment of a protein, or chemical moiety is used to immunize a host animal, numerous regions of the antigen may induce the production of antibodies that bind specifically to a given region or three-dimensional structure on the protein; these regions or structures are referred to as antigenic determinants. An antigenic determinant may compete with the intact antigen (i.e., the “immunogen” used to elicit the immune response) for binding to an antibody.

[0062] The term “antimicrobial agents” as used herein refers to any naturally-occurring, synthetic, or semi-synthetic compound or composition or mixture thereof, which is safe for human or animal use as practiced in the methods of the presently disclosed subject matter, and is effective in killing or substantially inhibiting the growth of microbes. “Antimicrobial” as used herein, includes antibacterial, antifungal, and antiviral agents.

[0063] The term “aqueous solution” as used herein can include other ingredients commonly used, such as sodium bicarbonate described herein, and further includes any acid or base solution used to adjust the pH of the aqueous solution while solubilizing a peptide.

[0064] The term “binding” refers to the adherence of molecules to one another, such as, but not limited to, enzymes to substrates, ligands to receptors, antibodies to antigens, DNA binding domains of proteins to DNA, and DNA or RNA strands to complementary strands.

[0065] “Binding partner”, as used herein, refers to a molecule capable of binding to another molecule.

[0066] The term “biocompatible”, as used herein, refers to a material that does not elicit a substantial detrimental response in the host.

[0067] As used herein, the term “biologically active fragments” or “bioactive fragment” of the peptides encompasses natural or synthetic portions of a longer peptide or protein that are capable of specific binding to their natural ligand or of performing the desired function of the protein, for example, a fragment of a protein of larger peptide which still contains the epitope of interest and is immunogenic.

[0068] The term “biological sample”, as used herein, refers to samples obtained from a subject, including, but not limited to, skin, hair, tissue, blood, plasma, cells, sweat, and urine.

[0069] The term “bioresorbable”, as used herein, refers to the ability of a material to be resorbed in vivo. “Full” resorption means that no significant extracellular fragments remain. The resorption process involves elimination of the original implant materials through the action of body fluids, enzymes, or cells. Resorbed calcium carbonate may, for example, be redeposited as bone mineral, or by being otherwise re-utilized within the body, or excreted. “Strongly bioresorbable”, as the term is used herein, means that at least 80% of the total mass of material implanted is resorbed within one year.

[0070] The term “cancer”, as used herein, is defined as proliferation of cells whose unique trait—loss of normal growth controls—results in unregulated growth, lack of differentiation, local tissue invasion, and metastasis. Examples include but are not limited to, leukemia, melanoma, breast cancer, prostate cancer, ovarian cancer, uterine cancer, cervical cancer, skin cancer, pancreatic cancer, colorectal cancer, renal cancer, and lung cancer.

[0071] As used herein, the term “carrier molecule” refers to any molecule that is chemically conjugated to the antigen of interest that enables an immune response resulting in antibodies specific to the native antigen.

[0072] The terms “cell culture” and “culture,” as used herein, refer to the maintenance of cells in an artificial, in vitro environment. It is to be understood, however, that the term “cell culture” is a generic term and may be used to encompass the cultivation not only of individual cells, but also of tissues, organs, organ systems or whole organisms, for which the terms “tissue culture,” “organ culture,” “organ system culture” or “organotypic culture” may occasionally be used interchangeably with the term “cell culture.”

[0073] The phrases “cell culture medium”, “culture medium” (plural “media” in each case) and “medium formulation” refer to a nutritive solution for cultivating cells and may be used interchangeably.

[0074] As used herein, the term “chemically conjugated”, or “conjugating chemically” refers to linking the antigen to the carrier molecule. This linking can occur on the genetic level using recombinant technology, wherein a hybrid protein may be produced containing the amino acid sequences, or portions thereof, of both the antigen and the carrier molecule. This hybrid protein is produced by an oligonucleotide sequence encoding both the antigen and the carrier molecule, or portions thereof. This linking also includes covalent bonds created between the antigen and the carrier protein using other chemical reactions, such as, but not limited to glutaraldehyde reactions. Covalent bonds may also be created using a third molecule bridging the antigen to the carrier molecule. These cross-linkers are able to react with groups, such as but not limited to, primary amines, sulfhydryls, carbonyls, carbohydrates, or carboxylic acids, on the antigen and the carrier molecule. Chemical conjugation also includes non-covalent linkage between the antigen and the carrier molecule.

[0075] A “coding region” of a gene consists of the nucleotide residues of the coding strand of the gene and the nucleotides of the non-coding strand of the gene which are homologous with or complementary to, respectively, the coding region of an mRNA molecule which is produced by transcription of the gene.

[0076] The term “competitive sequence” refers to a peptide or a modification, fragment, derivative, or homolog thereof that competes with another peptide for its cognate binding site.

[0077] “Complementary” as used herein refers to the broad concept of subunit sequence complementarity between two nucleic acids, e.g., two DNA molecules. When a nucleotide position in both of the molecules is occupied by nucleotides normally capable of base pairing with each other, then the nucleic acids are considered to be complementary to each other at this position. Thus, two nucleic acids are complementary to each other when a substantial number (at least 50%) of corresponding positions in each of the molecules are occupied by nucleotides which normally base pair with each other (e.g., A:T and G:C nucleotide pairs). Thus, it is known that an adenine residue of a first nucleic acid region is capable of forming specific hydrogen bonds (“base pairing”) with a residue of a second nucleic acid region which is antiparallel to the first region if the residue is thymine or uracil. Similarly, it is known that a cytosine residue of a first nucleic acid strand is capable of base pairing with a residue of a second nucleic acid strand which is antiparallel to the first strand if the residue is guanine. A first region of a nucleic acid is complementary to a second region of the same or a different nucleic acid if, when the two regions are arranged in an antiparallel fashion, at least one nucleotide residue of the first region is capable of base pairing with a residue of the second region. Preferably, the first region comprises a first portion and the second region comprises a second portion, whereby, when the first and second portions are arranged in an antiparallel fashion, at least about 50%, and preferably at least about 75%, at least about 90%, or at least about 95% of the nucleotide residues of the first portion are capable of base pairing with nucleotide residues in the second portion. More preferably, all nucleotide residues of the first portion are capable of base pairing with nucleotide residues in the second portion.

[0078] A “compound”, as used herein, refers to a polypeptide, an isolated nucleic acid, or other agent used in the method of the presently disclosed subject matter.

[0079] A “control” cell, tissue, sample, or subject is a cell, tissue, sample, or subject of the same type as a test cell, tissue, sample, or subject. The control may, for example, be examined at precisely or nearly the same time the test cell, tissue, sample, or subject is examined. The control may also, for example, be examined at a time distant from the time at which the test cell, tissue, sample, or subject is examined, and the results of the examination of the control may be recorded so that the recorded results may be compared with results obtained by examination of a test cell, tissue, sample, or subject. The control may also be obtained from another source or similar source other than the test group or a test subject, where the test sample is obtained from a subject suspected of having a disease, disorder, and/or condition for which the test is being performed.

[0080] A “test” cell is a cell being examined.

[0081] A “pathoindicative” cell is a cell which, when present in a tissue, is an indication that the animal in which the tissue is located (or from which the tissue was obtained) is afflicted with a disease or disorder.

[0082] A “pathogenic” cell is a cell which, when present in a tissue, causes or contributes to a disease, disorder, and/or condition in the animal in which the tissue is located (or from which the tissue was obtained).

[0083] A tissue “normally comprises” a cell if one or more of the cell are present in the tissue in an animal not afflicted with a disease or disorder.

[0084] As used herein, a “derivative” of a compound refers to a chemical compound that may be produced from another compound of similar structure in one or more steps, as in replacement of H by an alkyl, acyl, or amino group.

[0085] The use of the word “detect” and its grammatical variants refers to measurement of the species without quantification, whereas use of the word “determine” or “measure” with their grammatical variants are meant to refer to measurement of the species with quantification. The terms “detect” and “identify” are used interchangeably herein.

[0086] As used herein, a “detectable marker” or a “reporter molecule” is an atom or a molecule that permits the specific detection of a compound comprising the marker in the presence of similar compounds without a marker. Detectable markers or reporter molecules include, e.g., radioactive isotopes, antigenic determinants, enzymes, nucleic acids available for hybridization, chromophores, fluorophores, chemiluminescent molecules, electrochemically detectable molecules, and molecules that provide for altered fluorescence-polarization or altered light-scattering.

[0087] A “disease” is a state of health of an animal wherein the animal cannot maintain homeostasis, and wherein if the disease is not ameliorated then the animal's health continues to deteriorate.

[0088] In contrast, a “disorder” in an animal is a state of health in which the animal is able to maintain homeostasis, but in which the animal's state of health is less favorable than it would be in the absence of the disorder. Left untreated, a disorder does not necessarily cause a further decrease in the animal's state of health.

[0089] As used herein, the term “domain” refers to a part of a molecule or structure that shares common physicochemical features, such as, but not limited to, hydrophobic, polar, globular and helical domains or properties such as ligand binding, signal transduction, cell penetration and the like. Specific examples of binding domains include, but are not limited to, DNA binding domains and ATP binding domains.

[0090] As used herein, an “effective amount” or “therapeutically effective amount” means an amount sufficient to produce a selected effect, such as alleviating symptoms of a disease or disorder. In the context of administering compounds in the form of a combination, such as multiple compounds, the amount of each compound, when administered in combination with another compound(s), may be different from when that compound is administered alone. Thus, an effective amount of a combination of compounds refers collectively to the combination as a whole, although the actual amounts of each compound may vary. The term “more effective” means that the selected effect is alleviated to a greater extent by one treatment relative to the second treatment to which it is being compared.

[0091] The term “epitope” as used herein is defined as small chemical groups on the antigen molecule that can elicit and react with an antibody. An antigen can have one or more epitopes. Most antigens have many epitopes; i.e., they are multivalent. In general, an epitope is roughly five amino acids or sugars in size. One skilled in the art understands that generally the overall three-dimensional structure, rather than the specific linear sequence of the molecule, is the main criterion of antigenic specificity.

[0092] A “fragment” or “segment” is a portion of an amino acid sequence, comprising at least one amino acid, or a portion of a nucleic acid sequence comprising at least one nucleotide. The terms “fragment” and “segment” are used interchangeably herein.

[0093] As used herein, a “functional” biological molecule is a biological molecule in a form in which it exhibits a property by which it is characterized. A functional enzyme, for example, is one which exhibits the characteristic catalytic activity by which the enzyme is characterized.

[0094] “Homologous” as used herein, refers to the subunit sequence similarity between two polymeric molecules, e.g., between two nucleic acid molecules, e.g., two DNA molecules or two RNA molecules, or between two polypeptide molecules. When a subunit position in both of the two molecules is occupied by the same monomeric subunit, e.g., if a position in each of two DNA molecules is occupied by adenine, then they are homologous at that position. The homology between two sequences is a direct function of the number of matching or homologous positions, e.g., if half (e.g., five positions in a polymer ten subunits in length) of the positions in two compound sequences are homologous then the two sequences are 50% homologous, if 90% of the positions, e.g., 9 of 10, are matched or homologous, the two sequences share 90% homology. By way of example, the DNA sequences 5′-ATTGCC-3′ and 5′-TATGGC-3′ share 50% homology.

[0095] As used herein, “homology” is used synonymously with “identity”.

[0096] The determination of percent identity between two nucleotide or amino acid sequences can be accomplished using a mathematical algorithm. For example, a mathematical algorithm useful for comparing two sequences is the algorithm of Karlin & Altschul, 1990 modified as in Karlin & Altschul, 1993. This algorithm is incorporated into the NBLAST and XBLAST programs of Altschul et al. (1990), and can be accessed, for example at the National Center for Biotechnology Information (NCBI) world wide web site. BLAST nucleotide searches can be performed with the NBLAST program (designated “BLASTN” at the NCBI web site), using the following parameters: gap penalty=5; gap extension penalty=2; mismatch penalty=3; match reward=1; expectation value 10.0; and word size=11 to obtain nucleotide sequences homologous to a nucleic acid described herein. BLAST protein searches can be performed with the XBLAST program (designated “BLASTN” at the NCBI web site) or the NCBI “BLASTP” program, using the following parameters: expectation value 10.0, BLOSUM62 scoring matrix to obtain amino acid sequences homologous to a protein molecule described herein. To obtain gapped alignments for comparison purposes, Gapped BLAST can be utilized as described in Altschul et al., 1997. Alternatively, PSI-Blast or PHI-Blast can be used to perform an iterated search which detects distant relationships between molecules (Id.) and relationships between molecules which share a common pattern. When utilizing BLAST, Gapped BLAST, PSI-Blast, and PHI-Blast programs, the default parameters of the respective programs (e.g., XBLAST and NBLAST) can be used.

[0097] The percent identity between two sequences can be determined using techniques similar to those described above, with or without allowing gaps. In calculating percent identity, typically exact matches are counted

[0098] As used herein, the term “hybridization” is used in reference to the pairing of complementary nucleic acids. Hybridization and the strength of hybridization (i.e., the strength of the association between the nucleic acids) is impacted by such factors as the degree of complementarity between the nucleic acids, stringency of the conditions involved, the length of the formed hybrid, and the G:C ratio within the nucleic acids.

[0099] By the term “immunizing a subject against an antigen” is meant administering to the subject a composition, a protein complex, a DNA encoding a protein complex, an antibody or a DNA encoding an antibody, which elicits an immune response in the subject, and, for example, provides protection to the subject against a disease caused by the antigen or which prevents the function of the antigen.

[0100] The term “immunologically active fragments thereof” will generally be understood in the art to refer to a fragment of a polypeptide antigen comprising at least an epitope, which means that the fragment at least comprises 4 contiguous amino acids from the sequence of the polypeptide antigen.

[0101] As used herein, the term “inhaler” refers both to devices for nasal and pulmonary administration of a drug, e.g., in solution, powder and the like. For example, the term “inhaler” is intended to encompass a propellant driven inhaler, such as is used to administer antihistamine for acute asthma attacks, and plastic spray bottles, such as are used to administer decongestants.

[0102] The term “inhibit”, as used herein when referring to a function, refers to the ability of a compound of the presently disclosed subject matter to reduce or impede a described function. Preferably, inhibition is by at least 10%, more preferably by at least 25%, even more preferably by at least 50%, and most preferably, the function is inhibited by at least 75%. When the term “inhibit” is used more generally, such as “inhibit Factor I”, it refers to inhibiting expression, levels, and activity of Factor I.

[0103] The term “inhibit a complex”, as used herein, refers to inhibiting the formation of a complex or interaction of two or more proteins, as well as inhibiting the function or activity of the complex. The term also encompasses disrupting a formed complex. However, the term does not imply that each and every one of these functions must be inhibited at the same time.

[0104] As used herein “injecting, or applying, or administering” includes administration of a compound of the presently disclosed subject matter by any number of routes and means including, but not limited to, topical, oral, buccal, intravenous, intramuscular, intra-arterial, intramedullary, intrathecal, intraventricular, transdermal, subcutaneous, intraperitoneal, intranasal, enteral, topical, sublingual, vaginal, ophthalmic, pulmonary, or rectal means.

[0105] As used herein, an “instructional material” includes a publication, a recording, a diagram, or any other medium of expression which can be used to communicate the usefulness of the peptide of the presently disclosed subject matter in the kit for effecting alleviation of the various diseases or disorders recited herein. Optionally, or alternately, the instructional material may describe one or more methods of alleviating the diseases or disorders in a cell or a tissue of a mammal. The instructional material of the kit of the presently disclosed subject matter may, for example, be affixed to a container which contains the identified compound the presently disclosed subject matter or be shipped together with a container which contains the identified compound. Alternatively, the instructional material may be shipped separately from the container with the intention that the instructional material and the compound be used cooperatively by the recipient.

[0106] As used herein, a “ligand” is a compound that specifically binds to a target compound or molecule. A ligand “specifically binds to” or “is specifically reactive with” a compound when the ligand functions in a binding reaction which is determinative of the presence of the compound in a sample of heterogeneous compounds.

[0107] As used herein, the term “linkage” refers to a connection between two groups. The connection can be either covalent or non-covalent, including but not limited to ionic bonds, hydrogen bonding, and hydrophobic/hydrophilic interactions.

[0108] As used herein, the term “linker” refers to a molecule that joins two other molecules either covalently or noncovalently, e.g., through ionic or hydrogen bonds or van der Waals interactions.

[0109] As used herein, “parenteral administration” of a pharmaceutical composition includes any route of administration characterized by physical breaching of a tissue of a subject and administration of the pharmaceutical composition through the breach in the tissue. Parenteral administration thus includes, but is not limited to, administration of a pharmaceutical composition by injection of the composition, by application of the composition through a surgical incision, by application of the composition through a tissue-penetrating non-surgical wound, and the like. In particular, parenteral administration is contemplated to include, but is not limited to, subcutaneous, intraperitoneal, intramuscular, intrasternal injection, and kidney dialytic infusion techniques.

[0110] The term “peptide” typically refers to short polypeptides. In some embodiments, a peptide of the presently disclosed subject matter includes at least 6 and as many as 50, 75, or 100 amino acids.

[0111] The term “per application” as used herein refers to administration of a drug or compound to a subject.

[0112] The term “pharmaceutical composition” shall mean a composition comprising at least one active ingredient, whereby the composition is amenable to investigation for a specified, efficacious outcome in a mammal (for example, without limitation, a human).Those of ordinary skill in the art will understand and appreciate the techniques appropriate for determining whether an active ingredient has a desired efficacious outcome based upon the needs of the artisan.

[0113] As used herein, the term “pharmaceutically acceptable carrier” means a chemical composition with which an appropriate compound or derivative can be combined and which, following the combination, can be used to administer the appropriate compound to a subject. “Pharmaceutically acceptable” means physiologically tolerable, for either human or veterinary application.

[0114] As used herein, the term “physiologically acceptable” ester or salt means an ester or salt form of the active ingredient which is compatible with any other ingredients of the pharmaceutical composition, which is not deleterious to the subject to which the composition is to be administered.

[0115] As used herein, “pharmaceutical compositions” include formulations for human and veterinary use.

[0116] “Plurality” means at least two.

[0117] “Polypeptide” refers to a polymer composed of amino acid residues, related naturally occurring structural variants, and synthetic non-naturally occurring analogs thereof linked via peptide bonds, related naturally occurring structural variants, and synthetic non-naturally occurring analogs thereof.

[0118] “Synthetic peptides or polypeptides” refer to non-naturally occurring peptides or polypeptides. Synthetic peptides or polypeptides can be synthesized, for example, using an automated polypeptide synthesizer. Various solid phase peptide synthesis methods are known to those of skill in the art.

[0119] By “presensitization” is meant pre-administration of at least one innate immune system stimulator prior to challenge with an agent. This is sometimes referred to as induction of tolerance.

[0120] The term “prevent”, as used herein, means to stop something from happening, or taking advance measures against something possible or probable from happening. In the context of medicine, “prevention” generally refers to action taken to decrease the chance of getting a disease or condition.

[0121] A “preventive” or “prophylactic” treatment is a treatment administered to a subject who does not exhibit signs, or exhibits only early signs, of a disease or disorder. A prophylactic or preventative treatment is administered for the purpose of decreasing the risk of developing pathology associated with developing the disease or disorder.

[0122] As used herein, “protecting group” with respect to a terminal amino group refers to a terminal amino group of a peptide, which terminal amino group is coupled with any of various amino-terminal protecting groups traditionally employed in peptide synthesis. Such protecting groups include, for example, acyl protecting groups such as formyl, acetyl, benzoyl, trifluoroacetyl, succinyl, and methoxysuccinyl; aromatic urethane protecting groups such as benzyloxycarbonyl; and aliphatic urethane protecting groups, for example, tert-butoxycarbonyl or adamantyloxycarbonyl. See Gross & Mienhofer, 1981 for suitable protecting groups. With respect to a terminal carboxy group, “protecting group” refers to a terminal carboxyl group of a peptide, which terminal carboxyl group is coupled with any of various carboxyl-terminal protecting groups. Such protecting groups include, for example, tert-butyl, benzyl or other acceptable groups linked to the terminal carboxyl group through an ester or ether bond.

[0123] The term “protein” typically refers to large polypeptides, which in some embodiments are polypeptides of greater than 100 amino acids. Conventional notation is used herein to portray polypeptide sequences: the left-hand end of a polypeptide sequence is the amino-terminus (N-terminus); the right-hand end of a polypeptide sequence is the carboxy- or carboxyl-terminus (C-terminus).

[0124] As used herein, the term “purified” and like terms relate to an enrichment of a molecule or compound relative to other components normally associated with the molecule or compound in a native environment. The term “purified” does not necessarily indicate that complete purity of the particular molecule has been achieved during the process. A “highly purified” compound as used herein refers to a compound that is greater than 90% pure.

[0125] A “recombinant polypeptide” is one which is produced upon expression of a recombinant polynucleotide.

[0126] A “sample”, as used herein, refers preferably to a biological sample from a subject, including, but not limited to, normal tissue samples, diseased tissue samples, biopsies, blood, saliva, feces, semen, tears, and urine. A sample can also be any other source of material obtained from a subject which contains cells, tissues, or fluid of interest. A sample can also be obtained from cell or tissue culture.

[0127] By the term “specifically binds to”, as used herein, is meant when a compound or ligand functions in a binding reaction or assay conditions which is determinative of the presence of the compound in a sample of heterogeneous compounds.

[0128] The term “standard”, as used herein, refers to something used for comparison. For example, it can be a known standard agent or compound which is administered and used for comparing results when administering a test compound, or it can be a standard parameter or function which is measured to obtain a control value when measuring an effect of an agent or compound on a parameter or function. Standard can also refer to an “internal standard”, such as an agent or compound which is added at known amounts to a sample and is useful in determining such things as purification or recovery rates when a sample is processed or subjected to purification or extraction procedures before a marker of interest is measured. Internal standards are often a purified marker of interest which has been labeled, such as with a radioactive isotope, allowing it to be distinguished from an endogenous marker.

[0129] The term “stimulate” as used herein, means to induce or increase an activity or function level such that it is higher relative to a control value. The stimulation can be via direct or indirect mechanisms. In some embodiments, the activity or function is stimulated by at least 10% compared to a control value, more preferably by at least 25%, and even more preferably by at least 50%. The term “stimulator” as used herein, refers to any composition, compound or agent, the application of which results in the stimulation of a process or function of interest.

[0130] A “subject” of analysis, diagnosis, or treatment is an animal. Such animals include in some embodiments mammals, which in some embodiments can be a human.

[0131] As used herein, a “subject in need thereof” is a patient, animal, mammal, or human, who will benefit from the compositions and methods of the presently disclosed subject matter.

[0132] As used herein, a “substantially homologous amino acid sequences” includes those amino acid sequences which have at least about 95% homology, preferably at least about 96% homology, more preferably at least about 97% homology, even more preferably at least about 98% homology, and most preferably at least about 99% or more homology to an amino acid sequence of a reference antibody chain. Amino acid sequence similarity or identity can be computed by using the BLASTP and TBLASTN programs which employ the BLAST (basic local alignment search tool) 2.0.14 algorithm. The default settings used for these programs are suitable for identifying substantially similar amino acid sequences for purposes of the presently disclosed subject matter.

[0133] The term “substantially pure” describes a compound, e.g., a protein or polypeptide which has been separated from components which naturally accompany it. Typically, a compound is substantially pure when at least 10%, more preferably at least 20%, more preferably at least 50%, more preferably at least 60%, more preferably at least 75%, more preferably at least 90%, and most preferably at least 99% of the total material (by volume, by wet or dry weight, or by mole percent or mole fraction) in a sample is the compound of interest. Purity can be measured by any appropriate method, e.g., in the case of polypeptides by column chromatography, gel electrophoresis, or HPLC analysis. A compound, e.g., a protein, is also substantially purified when it is essentially free of naturally associated components or when it is separated from the native contaminants which accompany it in its natural state.

[0134] A “therapeutic” treatment is a treatment administered to a subject who exhibits signs of pathology for the purpose of diminishing or eliminating those signs.

[0135] A “therapeutically effective amount” of a compound is that amount of compound which is sufficient to provide a beneficial effect to the subject to which the compound is administered.

[0136] The term to “treat”, as used herein, means reducing the frequency with which symptoms are experienced by a patient or subject or administering an agent or compound to reduce the frequency with which symptoms are experienced.

[0137] A “prophylactic” treatment is a treatment administered to a subject who does not exhibit signs of a disease or exhibits only early signs of the disease for the purpose of decreasing the risk of developing pathology associated with the disease.

[0138] By the term “vaccine,” as used herein, is meant a composition which when inoculated into a subject has the effect of stimulating an immune response in the subject, which serves to fully or partially protect the subject against a disease, disorder, or condition or at least one of its symptoms. In some embodiments, the disease, disorder, or condition is cancer. In some embodiments, the disease, disorder, or condition is a microbial infect, which in some embodiments can be a bacterial infection and in some embodiments can be a viral infection. The term vaccine encompasses prophylactic as well as therapeutic vaccines. A combination vaccine is one which combines two or more vaccines, or two or more compounds or agents.

### II. Peptides and Modified Peptides

[0139] The presently disclosed subject matter relates in some embodiments to immunogenic therapeutic peptides for use in immunotherapy and diagnostic methods of using the peptides, as well as methods of selecting the same to make compositions for immunotherapy, e.g., in vaccines and/or in compositions useful in adaptive cell transfer. In some embodiments, the peptides of the presently disclosed subject matter are post-translationally modified by being provided with a phosphate group, (i.e., “phosphopeptides”). In some embodiments, the peptides of the presently disclosed subject matter are summarized in Table 6 and/or Table 7 herein below.

[0140] The peptides of the presently disclosed subject matter are in some embodiments not the entire proteins from which they are derived. They are in some embodiments from 6 to 50 contiguous amino acid residues of the native human protein. They can in some embodiments contain exactly, about, or at least 6, 7, 8, 9, 10, 11, 12, 13, 14, 15, 16, 17, 18, 19, 20, 21, 22, 23, 24, 25, 26, 27, 28, 29, 30, 31, 32, 33, 34, 35, 36, 37, 38, 39, 40, 41, 42, 43, 44, 45, 46, 47, 48, 49, or 50 amino acids. The peptides of the presently disclosed subject matter can also in some embodiments have a length that falls in the ranges of 6-10, 9-12, 10-13, 11-14, 12-15, 15-20, 20-25, 25-30, 30-35, 35-40, and 45-50 amino acids. Exactly, about, or at least 1, 2, 3, 4, 5, 6, 7, 8, 9, 10, 11, 12, 13, 14, 15, 16, 17, or more of the amino acid residues within the recited sequence of a peptide can phosphorylated. Peptides can be modified and analogs (using for example, beta-amino acids, L-amino acids, N-methylated amino acids, amidated amino acids, non-natural amino acids, retro inverse peptides, peptoids, PNA, halogenated amino acids) can be synthesized that retain their ability to stimulate a particular immune response, but which also gain one or more beneficial features, such as those described below. Thus, particular peptides can, for example, have use for treating and vaccinating against multiple cancer types.

[0141] In some embodiments, substitutions can be made in the peptides at residues known to interact with the MHC molecule. Such substitutions can in some embodiments have the effect of increasing the binding affinity of the peptides for the MHC molecule and can also increase the half-life of the peptide-MHC complex, the consequence of which is that the analog is in some embodiments a more potent stimulator of an immune response than is the original peptide.

[0142] Additionally, the substitutions can in some embodiments have no effect on the immunogenicity of the peptide per se, but rather can prolong its biological half-life or prevent it from undergoing spontaneous alterations which might otherwise negatively impact on the immunogenicity of the peptide.

[0143] The peptides disclosed herein can in some embodiments have differing levels of immunogenicity, MHC binding and ability to elicit CTL responses against cells displaying a native peptide, e.g., on the surface of a tumor cell.

[0144] The amino acid sequences of the peptides can in some embodiments be modified such that immunogenicity and/or binding is enhanced. In some embodiments, the modified peptide binds an MHC class I molecule about or at least 10%, 20%, 30%, 40%, 50%, 60%, 70%, 80%, 90%, 95%, 100%, 110%, 125%, 150%, 175%, 200%, 225%, 250%, 275%, 300%, 350%, 375%, 400%, 450%, 500%, 600%, 700%, 800%, 1000%, or more tightly than its native (unmodified) counterpart.

[0145] However, given the exquisite sensitivity of the T-cell receptor, it cannot be foreseen whether such enhanced binding and/or immunogenicity will render a modified peptide still capable of inducing an activated CTL that will cross react with the native peptide being displayed on the surface of a tumor. Indeed, it is disclosed herein that the binding affinity of a peptide does not predict its functional ability to elicit a T cell response.

[0146] Peptides of the presently disclosed subject matter can in some embodiments be mixed together to form a cocktail. The peptides can in some embodiments be in an admixture, or they can in some embodiments be linked together in a concatemer as a single molecule. Linkers between individual peptides can in some embodiments be used; these can, for example, in some embodiments be formed by any 10 to 20 amino acid residues. The linkers can in some embodiments be random sequences, or they can in some embodiments be optimized for degradation by dendritic cells.

[0147] In certain specified positions, a native amino acid residue in a native human protein can in some embodiments be altered to enhance the binding to the MHC class I molecule. These can occur in “anchor” positions of the peptides, often in positions 1, 2, 3, 9, or 10. Valine (V), alanine (A), lysine (K), leucine (L), isoleucine (I), tyrosine (Y), arginine (R), phenylalanine (F), proline (P), glutamic acid (E), glutamine (Q), threonine (T), serine (S), aspartic acid (D), tryptophan (W), and methionine (M) can also be used in some embodiments as improved anchoring residues. Anchor residues for different HLA molecules are listed below. Anchor residues for exemplary HLA molecules are listed in Table 1.

TABLE 1
Anchor Residues for Different HLA Molecules

| | | | | | Residue |
|---|---|---|---|---|---|
| | Residue | Residue | Residue | Residue | 9 or Last |
| | 1 | 2 | 3 | 7 | Residue |
| HLA A*0101 | | T, S | D, E | | Y |
| HLA A*0201 | | L, M | | | V |
| HLA A*0301 | | L, M | | | K |
| HLA A*24 | | Y, W, M | | | L, F, W |
| HLA B*0702 | | P | | | L, M, V, F |
| HLA B*1508 | | P, A | | | Y |
| HLA B*2705 | R | R | | | L, F, K, R, M |
| HLA B*4402 | | E | | | F, Y, W |
| HLA C*0501 | Y | P, A | D | | F, I, L, M, V |
| HLA C*0602 | F, Y | R, Y | A, F, Y | K, Q, R | I, L, M, V |

[0148] In some embodiments, the immunogenicity of a peptide is measured using transgenic mice expressing human MHC class I genes. For example, “ADD Tg mice” express an interspecies hybrid class I MHC gene, AAD, which contains the alpha-1 and alpha-2 domains of the human HLA-A2.1 gene and the alpha-3 transmembrane and cytoplasmic domains of the mouse H-2Dd gene, under the direction of the human HLA-A2.1 promoter. Immunodetection of the HLA-A2.1 recombinant transgene established that expression was at equivalent levels to endogenous mouse class I molecules. The mouse alpha-3 domain expression enhances the immune response in this system. Compared to unmodified HLA-A2.1, the chimeric HLA-A2.1/H2-Dd MHC Class I molecule mediates efficient positive selection of mouse T cells to provide a more complete T cell repertoire capable of recognizing peptides presented by HLA-A2.1 Class I molecules. The peptide epitopes presented and recognized by mouse T cells in the context of the HLA-A2.1/H2-Dd class I molecule are the same as those presented in HLA-A2.1⁺ humans. This transgenic strain facilitates the modeling of human T cell immune responses to HLA-A2 presented antigens, and identification of those antigens. This transgenic strain is a preclinical model for design and testing of vaccines for infectious diseases or cancer therapy involving optimal stimulation of CD8⁺ cytolytic T cells.

[0149] In some embodiments, the immunogenicity of a modified peptide is determined by the degree of Interferon gamma and/or TNF-α production of T-cells from ADD Tg mice immunized with the peptide, e.g., by immunization with peptide pulsed bone marrow derived dendritic cells.

[0150] In some embodiments, the modified peptides are about or at least 10%, 20%, 30%, 40%, 50%, 60%, 70%, 80%, 90%, 95%, 100%, 110%, 125%, 150%, 175%, 200%, 225%, 250%, 275%, 300%, 350%, 375%, 400%, 450%, 500%, 600%, 700%, 800%, 1000%, 1500%, 2000%, 2500%, 3000%, 4000%, 5000%, or more immunogenic, e.g., in terms of numbers of Interferon gamma and/or TNF-alpha positive (i.e., “activated”) T-cells relative to numbers elicited by native peptides in ADD Tg mice immunized with peptides pulsed bone marrow derived dendritic cells. In some embodiments, the modified peptides are able to elicit CD8⁺ T cells which are cross-reactive with the modified and the native peptide in general and when such modified and native peptides are complexed with MHC class I molecules in particular. In some embodiments, the CD8⁺ T cells which are cross-reactive with the modified and the native peptides are able to reduce tumor size by about or at least 10%, 20%, 30%, 40%, 50%, 60%, 70%, 80%, 90%, 95%, 97%, or 99% in a NOD/SCID/IL-2Rγc^{-/-} knock out mouse (which has been provided transgenic T cells specific form an immune competent donor) relative to IL-2 treatment without such cross-reactive CD8⁺ T cells.

[0151] The term “capable of inducing a peptide-specific memory T cell response in a patient” as used herein relates to eliciting a response from memory T cells (also referred to as “antigen-experienced T cell”) which are a subset of infection- and cancer-fighting T cells that have previously encountered and responded to their cognate antigen. Such T cells can recognize foreign invaders, such as bacteria or viruses, as well as cancer cells. Memory T cells have become “experienced” by having encountered antigen during a prior infection, encounter with cancer, or previous vaccination. At a second encounter with the cognate antigen, e.g., by way of an initial inoculation with a peptide of the presently disclosed subject matter, memory T cells can reproduce to mount a faster and stronger immune response than the first time the immune system responded to the invader (e.g., through the body's own consciously unperceived recognition of a peptide being associated with diseased tissue). This behavior can be assayed in T lymphocyte proliferation assays, which can reveal exposure to specific antigens. Memory T cells comprise two subtypes: central memory T cells (T_{CM} cells) and effector memory T cells (T_{EM} cells). Memory cells can be either CD4⁺ or CD8⁺. Memory T cells typically express the cell surface protein CD45RO. Central memory T_{CM} cells generally express L-selectin and CCR7, they secrete IL-2, but not IFNγ or IL-4. Effector memory TEM cells, however, generally do not express L-selectin or CCR7 but produce effector cytokines like IFNγ and IL-4.

[0152] A memory T cell response generally results in the proliferation of memory T cell and/or the upregulation or increased secretion of the factors such as CD45RO, L-selectin, CCR7, IL-2, IFNγ, CD45RA, CD27, and/or IL-4. In some embodiments, the peptides of the presently disclosed subject matter are capable of inducing a TCM cell response associated with L-selectin, CCR7, IL-2 (but not IFNγ or IL-4) expression and/secretion (see e.g., Hamann et al., 1997). In some embodiments, a TCM cell response is associated with an at least or about 1%, 5%, 10%, 15%, 20%, 25%, 30%, 35%, 45%, 50%, 55%, 60%, 65%, 70%, 75%, 80%, 90%, 95%, 97%, 98%, 99%, 100%, 125%, 150%, 175%, 200%, 250%, 300%, 400%, 500%, 600%, 700%, 800%, 900%, 1000%, 1500%, 2000%, or more increase in T cell CD45RO/RA, L-selectin, CCR7, or IL-2 expression and/secretion.

[0153] In some embodiments, the peptides of the presently disclosed subject matter are capable of inducing a CD8⁺ T_{CM} cell response in a patient the first time that patient is provided the composition including the selected peptides. As such, the peptides of the presently disclosed subject matter can in some embodiments be referred to as “neo-antigens”. Although peptides might be considered “self” for being derived from self-tissue, they generally are only found on the surface of cells with a dysregulated metabolism, e.g., aberrant phosphorylation, they are likely never presented to immature T cells in the thymus. As such, these “self” antigens act are neo-antigens because they are nevertheless capable of eliciting an immune response.

[0154] In some embodiments, about or at least 1%, 5%, 10%, 15%, 20%, 25%, 30%, 35%, 45%, 50%, 55%, 60%, 65%, 70%, 75%, 80%, 90%, 95%, 97%, 98%, or 99% of T cells activated by particular peptide in a particular patient sample are T_{CM} cells. In some embodiments, a patient sample is taken exactly, about or at least 1, 2, 3, 4, 5, 6, 7, 8, 9, 10, 11, 12, 13, 14, 15, 16, 17, 18, 19, 20, 21, 22, 23, 24, 25, 26, 27, 28, 29, 30, or more days after an initial exposure to a particular peptide and then assayed for peptide specific activated T cells and the proportion of T_{CM} cells thereof. In some embodiments, the compositions of the presently disclosed subject matter are able to elicit a CD8⁺ T_{CM} cell response in at least or about 1%, 5%, 10%, 15%, 20%, 25%, 30%, 35%, 45%, 50%, 55%, 60%, 65%, 70%, 75%, 80%, 90%, 95%, 97%, 98%, 99%, or 100% of patients and/or healthy volunteers. In some embodiments, the compositions of the presently disclosed subject matter are able to elicit a CD8⁺ T_{CM} cell response in a patient about or at least 1%, 5%, 10%, 15%, 20%, 25%, 30%, 35%, 45%, 50%, 55%, 60%, 65%, 70%, 75%, 80%, 90%, 95%, 97%, 98%, 99%, or 100% of patients and/or healthy volunteers specific to all or at least or about 1, 2, 3, 4, 5, 6, 7, 8, 9, or 10 peptides in the composition. In some embodiments, the aforementioned T cell activation tests are done by ELISpot assay.

[0155] In some embodiments, the peptides of the presently disclosed subject matter are post-translationally-modified by being provided with a phosphate group (referred to herein as “phosphopeptides”). The term “phosphopeptides” includes MHC class I-specific phosphopeptides. Exemplary MEW class I phosphopeptides of the presently disclosed subject matter that are associated in some embodiments with hepatocellular carcinoma are set forth in Tables 6 and 7. In Tables 6 and 7, phosphoserine, phosphothreonine, and phosphotyrosine residues are indicated by “s”, “t”, and “y”, respectively. It is noted, however, that serine, threonine, and tyrosine residues depicted in uppercase “S”, “T”, and “Y” can also be modified, for example by phosphorylation, and further that in peptides with a plurality of serine/threonine/tyrosine residues, each and every combination and subcombination of serine, threonine, and tyrosine residues can be replaced with phosphoserine, phosphothreonine/ore, and phosphotyrosine residues. A lowercase “c” in a peptide sequence indicates that in some embodiments the cysteine is present in a cysteine-cysteine disulfide bond at the surface of a cell and, in some embodiments, is presented to the immune system as such.

[0156] In some embodiments, the phosphopeptides of the presently disclosed subject matter comprise the amino acid sequences of at least one of the MEW class I binding peptides set forth in SEQ ID NOs: 1-3921 and 3975-4000. Moreover, in some embodiments about or at least 1, 2, 3, 4, 5, 6, 7, 8, 9, 10, 11, 12, 13, 14, 15, or more of the serine, homo-serine, threonine, or tyrosine residues within the recited sequence is phosphorylated. The phosphorylation can in some embodiments be with a natural phosphorylation (—CH₂—O—PO₃H) or with an enzyme non-degradable, modified phosphorylation, such as (—CH₂—CF₂—PO₃H or —CH₂—CH₂—PO₃H). Some phosphopeptides can contain more than one of the amino acid sequences set forth in SEQ ID NOs: 1-3921 and 3975-4000, for example, if they are overlapping, adjacent, or nearby within the native protein from which they are derived.

[0157] In some embodiments, the peptides comprise a phosphopeptide mimetic. In some embodiments, the phosphopeptide mimetic replaces a phosphoserine, phosphothreonine, or phosphotyrosine residue indicated in Tables 6 and 7. The chemical structure of a phosphopeptide mimetic appropriate for use in the presently disclosed subject matter can in some embodiments closely approximate the natural phosphorylated residue which is mimicked, and also can in some embodiments be chemically stable (e.g., resistant to dephosphorylation by phosphatase enzymes). This can be achieved with a synthetic molecule in which the phosphorous atom is linked to the amino acid residue, not through oxygen, but through carbon. In some embodiments, a CF₂ group links the amino acid to the phosphorous atom. Mimetics of several amino acids which are phosphorylated in nature can be generated by this approach. Mimetics of phosphoserine, phosphothreonine, and phosphotyrosine can be generated by placing a CF₂ linkage from the appropriate carbon to the phosphate moiety. The mimetic molecule L-2-amino-4 (diethylphosphono)-4,4-difluorobutanoic acid (F2Pab) can in some embodiments substitute for phosphoserine (Otaka et al., 1995). L-2-amino-4-phosphono-4,4difluoro-3-methylbutanoic acid (F2Pmb) can in some embodiments substitute for phosphothreonine. L-2-amino-4-phosphono (difluoromethyl) phenylalanine (F2Pmp) can in some embodiments substitute for phosphotyrosine (Smyth et al., 1992; Akamatsu et al., 1997). Alternatively, the oxygen bridge of the natural amino acid can in some embodiments be replaced with a methylene group. In some embodiments, serine and threonine residues are substituted with homo-serine and homo-threonine residues, respectively. A phosphomimetic can in some embodiments also include vanadate, pyrophosphate or fluorophosphates.

### III. Immunosuitablity

[0158] In some embodiments, the peptides of the presently disclosed subject matter are combined into compositions which can be used in vaccine compositions for eliciting anti-tumor immune responses or in adoptive T-cell therapy of cancer patients and/or patients with microbial infections. Tables 3-7 provide peptides presented on the surface of cancer cells.

[0159] The presently disclosed subject matter provides in some embodiments peptides which are immunologically suitable for each of the foregoing HLA alleles and, in particular, HLA-A*0201 molecule, an HLA A*0101 molecule, an HLA A*0301 molecule, an HLA B*4402 molecule, an HLA B*0702 molecule, an HLA B*2705 molecule, an HLA *A1101 molecule, an HLA *A2301 molecule, an HLA *A2402 molecule, an HLA *B0801 molecule, an HLA *B1401 molecule, an HLA *B1402 molecule, an HLA *B1501 molecule, an HLA *B1503 molecule, an HLA *B1510 molecule, an HLA *B1511 molecule, an HLA *B1518 molecule, an HLA *B4001 molecule, an HLA *B4901 molecule, an HLA *C0303 molecule, an HLA *C0304 molecule, an HLA *C0501 molecule, an HLA *0602 molecule, an HLA *0701 molecule, an HLA *0702 molecule, and an HLA *0704 molecule. “Immunologically suitable” means that a peptide will bind at least one allele of an MEW class I molecule and/or an MEW class II molecule in a given patient. Compositions of the presently disclosed subject matter are in some embodiments immunologically suitable for a patient when at least one peptide of the composition will bind at least one allele of an MEW class I molecule and/or an MHC class II moleculein a given patient. Compositions of multiple peptides presented by each of the most prevalent alleles used in a cocktail, ensures coverage of the human population and to minimize the possibility that the tumor will be able to escape immune surveillance by down-regulating expression of any one class I and/or class II peptide.

[0160] The compositions of the presently disclosed subject matter can in some embodiments have at least one peptide specific for HLA-A*0201 molecule, an HLA A*0101 molecule, an HLA A*0301 molecule, an HLA B*4402 molecule, an HLA B*0702 molecule, an HLA B*2705 molecule, an HLA *A1101 molecule, an HLA *A2301 molecule, an HLA *A2402 molecule, an HLA *B0801 molecule, an HLA *B1401 molecule, an HLA *B1402 molecule, an HLA *B1501 molecule, an HLA *B1503 molecule, an HLA *B1510 molecule, an HLA *B1511 molecule, an HLA *B1518 molecule, an HLA *B4001 molecule, an HLA *B4901 molecule, an HLA *C0303 molecule, an HLA *C0304 molecule, an HLA *C0501 molecule, an HLA *0602 molecule, an HLA *0701 molecule, an HLA *0702 molecule, and an HLA *0704 molecule. The compositions can in some embodiments have at least one phosphopeptide specific for an HLA allele selected from the group consisting of HLA-A*0201 molecule, an HLA A*0101 molecule, an HLA A*0301 molecule, an HLA B*4402 molecule, an HLA B*0702 molecule, an HLA B*2705 molecule, an HLA *A1101 molecule, an HLA *A2301 molecule, an HLA *A2402 molecule, an HLA *B0801 molecule, an HLA *B1401 molecule, an HLA *B1402 molecule, an HLA *B1501 molecule, an HLA *B1503 molecule, an HLA *B1510 molecule, an HLA *B1511 molecule, an HLA *B1518 molecule, an HLA *B4001 molecule, an HLA *B4901 molecule, an HLA *C0303 molecule, an HLA *C0304 molecule, an HLA *C0501 molecule, an HLA *0602 molecule, an HLA *0701 molecule, an HLA *0702 molecule, and an HLA *0704 molecule. In some embodiments, the compositions can further comprise additional phosphopeptides from other MHC class I and/or class II alleles.

[0161] As such, the compositions of the presently disclosed subject matter containing various combinations of peptides will in some embodiments be immunologically suitable for between or about 3-88%, 80-89%, 70-79%, 60-69%, 57-59%, 55-57%, 53-55% or 51-53% or 5-90%, 10-80%, 15-75%, 20-70%, 25-65%, 30-60%, 35-55%, or 40-50% of the population of a particular cancer and/or a microbial infection. In some embodiments, the compositions of the presently disclosed subject matter are able to act as vaccine compositions for eliciting anti-tumor immune responses or in adoptive T-cell therapy of cancer patients and patients with microbial infections, wherein the compositions are immunologically suitable for about or at least 88, 87, 86, 85, 84, 83, 82, 81, 80, 79, 78, 77, 76,75, 74, 73, 72, 71, 70, 69, 68, 67, 66, 65, 64, 63, 62, 61, 60, 59, 58, 57, 56, 55, 54, 53, 52, 51, 50, 49, 48, 47, 46, 45, 44, 43, 42, 41, 40, 39, 38, 37, 36, 35, 34, 33, 32, 31, 30, 29, 28, 27, 26, 25, 24, 23, 22, 20, 19, 18, 17, 16, 15, 14, 13, 12, 11, 10, 9, 8, 7, 6, 5, 4 or 3 percent of cancer patients and/or patients with microbial infections.

### IV. Compositions and Methods of Use

[0162] “Peptide compositions” as used herein refers to at least one peptide formulated for example, as a vaccine; or as a preparation for pulsing cells in a manner such that the pulsed cells, e.g., dendritic cells, will display the at least one peptide in the composition on their surface, e.g., to T-cells in the context of adoptive T-cell therapy.

[0163] The compositions of the presently disclosed subject matter can include in some embodiments about or at least 1, 2, 3, 4, 5, 6, 7, 8, 9, 10, 11, 12, 13, 14, 15, 16, 17, 18, 19, 20, 21, 22, 23, 24, 25, 26, 27, 28, 29, 30, 31, 32, 33, 34, 35, 36, 37, 38, 39, 40, 41, 42, 43, 44, 45, 46, 47, 48, 49, 50, 50-55, 55-65, 65-80, 80-120, 90-150, 100-175, or 175-250 different peptides.

[0164] The compositions of the presently disclosed subject matter generally include MHC class I- and/or class II-specific peptide(s) but in some embodiments can also include one or more peptides specific for MHC class I and/or class II and/or other peptides associated with tumors, e.g., tumor-associated antigen (“TAA”).

[0165] Compositions comprising the presently disclosed peptide are typically substantially free of other human proteins or peptides. They can be made synthetically or by purification from a biological source. They can be made recombinantly. In some embodiments, they are at least 90%, 92%, 93%, 94%, at least 95%, or at least 99% pure. For administration to a human body, in some embodiments they do not contain other components that might be harmful to a human recipient. The compositions are typically devoid of cells, both human and recombinant producing cells. However, as noted below, in some cases, it can be desirable to load dendritic cells with a peptide and use those loaded dendritic cells as either an immunotherapy agent themselves, or as a reagent to stimulate a patient's T cells ex vivo. The stimulated T cells can be used as an immunotherapy agent. In some embodiments, it can be desirable to form a complex between a peptide and an HLA molecule of the appropriate type. Such complexes can in some embodiments be formed in vitro or in vivo. Such complexes are typically tetrameric with respect to an HLA-peptide complex. Under certain circumstances it can be desirable to add additional proteins or peptides, for example, to make a cocktail having the ability to stimulate an immune response in a number of different HLA type hosts. Alternatively, additional proteins or peptide can provide an interacting function within a single host, such as an adjuvant function or a stabilizing function. As a non-limiting example, other tumor antigens can be used in admixture with the peptides, such that multiple different immune responses are induced in a single patient.

[0166] Administration of peptides to a mammalian recipient can in some embodiments be accomplished using long peptides (e.g., longer than 8, 10, 12, or 15 residues) or using peptide-loaded dendritic cells (see Melief, 2009). The immediate goal is to induce activation of CD8⁺ T cells. Additional components which can be administered to the same patient, either at the same time or close in time (e.g., within 21 days of each other) include TLR-ligand oligonucleotide CpG and related peptides that have overlapping sequences of at least 6 amino acid residues. To ensure efficacy, mammalian recipients should express the appropriate human HLA molecules to bind to the peptides. Transgenic mammals can be used as recipients, for example, if they express appropriate human HLA molecules. If a mammal's own immune system recognizes a similar peptide then it can be used as model system directly, without introducing a transgene. Useful models and recipients can in some embodiments be at increased risk of developing metastatic cancer, such as HCC. Other useful models and recipients can be predisposed, e.g., genetically or environmentally, to develop HCC or other cancer.

[0167] IV.A. Selection of Peptides

[0168] Disclosed herein is the finding that immune responses can be generated against phosphorylated peptides tested in healthy and diseased individuals. The T-cells associated with these immune responses, when expanded in vitro, are able to recognize and kill malignant tissue (both established cells lines and primary tumor samples). Cold-target inhibition studies reveal that these peptide-specific T-cell lines kill primary tumor tissue in a peptide-specific manner.

[0169] When selecting peptides of the presently disclosed subject matter for inclusion in immunotherapy, e.g., in adaptive cell therapy or in the context of a vaccine, one can preferably pick peptides that in some embodiments: 1) are associated with a particular cancer/tumor cell type; 2) are associated with a gene/protein involved in cell proliferation; 3) are specific for an HLA allele carried the group of patients to be treated; and/or 4) are capable of inducing a peptide-specific memory T cell response in the patients to be treated upon a first exposure to a composition including the selected peptides.

[0170] IV.B. Peptide Vaccines

[0171] The peptides of the presently disclosed subject matter can also in some embodiments be used to vaccinate an individual. The peptides can be injected alone or in some embodiments can be administered in combination with an adjuvant, a pharmaceutically acceptable carrier, or combinations thereof. Vaccines are envisioned to prevent or treat certain diseases, disorders, and/or conditions in general, and cancers and/or microbial infections in particular.

[0172] The peptide compositions of the presently disclosed subject matter can in some embodiments be used as a vaccine for cancer, and more specifically for hepatocellular carcinoma (HCC), esophageal cancer, melanoma, leukemia, ovarian, breast, colorectal, or lung squamous cancer, sarcoma, renal cell carcinoma, pancreatic carcinomas, squamous tumors of the head and neck, brain cancer, liver cancer, prostate cancer, and cervical cancer. The compositions can in some embodiments include peptides. The vaccine compositions can in some embodiments include only the peptides, or peptides disclosed herein, or they can include other cancer antigens that have been identified.

[0173] Additionally, compositions of the presently disclosed subject matter can in some embodiments be used as a vaccine for microbial infections.

[0174] The vaccine compositions can in some embodiments be used prophylactically for the purposes of preventing, reducing the risk of, and/or delaying initiation of a cancer and/or a microbial infection in an individual that does not currently have cancer. Alternatively, they can be used to treat an individual that already has cancer, so that recurrence or metastasis is delayed and/or prevented. Prevention relates to a process of prophylaxis in which the individual is immunized prior to the induction or onset of cancer. For example, individuals with a history of poor life style choices and at risk for developing HCC can in some embodiments be immunized prior to the onset of the disease.

[0175] Alternatively or in addition, individuals that already have cancer can be immunized with the antigens of the presently disclosed subject matter so as to stimulate an immune response that would be reactive against the cancer. A clinically relevant immune response would be one in which the cancer partially or completely regresses and/or is eliminated from the patient, and it would also include those responses in which the progression of the cancer is blocked without being eliminated. Similarly, prevention need not be total, but can in some embodiments result in a reduced risk, delayed onset, and/or delayed progression or metastasis.

[0176] The peptide vaccines of the presently disclosed subject matter can in some embodiments be given to patients before, after, or during any of the aforementioned stages of cancer and/or microbial infection. In some embodiments, they are given to patients with malignant HCC and/or malignant esophageal cancer (e.g., squamous cell carcinoma and/or adenocarcinoma).

[0177] In some embodiments, the 5-year survival rate of patients treated with the vaccines of the presently disclosed subject matter is increased by a statistically significant amount, e.g., by about or at least 1, 2, 3, 4, 5, 6, 7, 8, 9, 10, 11, 12, 13, 14, 15, 16, 17, 18, 19, 20, 21, 22, 23, 24, 25, 26, 27, 28, 29, 30, 31, 32, 33, 34, 35, 36, 37, 38, 39, 40, 41, 42, 43, 44, 45, 46, 47, 48, 49, 50, 51, 52, 53, 54, 55, 56, 57, 58, 59, 60, 61, 62, 63, 64, 65, 66, 67, 68, 69, 70, 71, 72, 73, 74, 75, 76, 77, 78, 79, 80, 81, 82, 83, 84, 85, 86, 87, 88, 89, 90, 91, 92, 93, 94, 95, 96, 97, 98, 99, 100, or more percent, relative to the average 5-year survival rates described above.

[0178] In some embodiments, the peptide vaccine composition of the presently disclosed subject matter will increase survival rates in patients with cancer (e.g., metastatic HCC and/or malignant esophageal cancer) by a statistically significant amount of time, e.g., by about or at least, 0.25, 0.5, 0.75, 1.0, 1.25, 1.5, 1.75, 2.0, 2.25, 2.5, 2.75, 3.0, 3.25, 3.5, 4.0, 4.25, 4.5, 4.75, 5.0, 5.25, 5.5, 5.75, 6.0, 6.25, 6.5, 6.75, 7.0, 7.25, 7.5, 7.75, 8.0, 8.25, 8.5, 8.75, 9.0, 9.25, 9.50, 9.75, 10.0, 10.25, 10.5, 10.75, 11.0, 11.25, 11.5, 11.75, or 12 months or more compared to what could have been expected without vaccine treatment at the time of filing of this disclosure.

[0179] In some embodiments, the survival rate, e.g., the 1, 2, 3, 4, or 5-year survival rate, of patients treated with the vaccines of the presently disclosed subject matter is increased by a statistically significant amount, e.g., by about, or at least 1, 2, 3, 4, 5, 6, 7, 8, 9, 10, 11, 12, 13, 14, 15, 16, 17, 18, 19, 20, 21, 22, 23, 24, 25, 26, 27, 28, 29, 30, 31, 32, 33, 34, 35, 36, 37, 38, 39, 40, 41, 42, 43, 44, 45, 46, 47, 48, 49, 50, 51, 52, 53, 54, 55, 56, 57, 58, 59, 60, 61, 62, 63, 64, 65, 66, 67, 68, 69, 70, 71, 72, 73, 74, 75, 76, 77, 78, 79, 80, 81, 82, 83, 84, 85, 86, 87, 88, 89, 90, 91, 92, 93, 94, 95, 96, 97, 98, 99, or 100 percent, relative to the average 5-year survival rates described above.

[0180] The peptide vaccines of the presently disclosed subject matter are in some embodiments envisioned to illicit a T cell associated immune response, e.g., generating activated CD8⁺ T cells specific for native peptide/MHC class I expressing cells, specific for at least or about 1, 2, 3, 4, 5, 6, 7, 8, 9, 10, or more of the peptides in the vaccine in a patient for about or at least 1, 2, 3, 4, 5, 6, 7, 8, 9, 10, 11, 12, 13, 14, 15, 16, 17, 18, 19, 20, 21, 22, 23, 24, 25, 26, 27, 28, 29, 30, 31, 32, 33, 34, 35, 36, 37, 38, 39, 40, 41, 42, 43, 44, 45, 46, 47, 48, 49, 50, 51, 52, 53, 54, 55, 56, 57, 58, 59, 60, 61, 62, 63, 64, 65, 66, 67, 68, 69, 70, 71, 72, 73, 74, 75, 76, 77, 78, 79, 80, 81, 82, 83, 84, 85, 86, 87, 88, 89, 90, 91, 92, 93, 94, 95, 96, 07, 98, 99, or 100 days after providing the vaccine to the patient.

[0181] In some embodiments, the treatment response rates of patients treated with the peptide vaccines of the presently disclosed subject matter are increased by a statistically significant amount, e.g., by about, or at least 1, 2, 3, 4, 5, 6, 7, 8, 9, 10, 11, 12, 13, 14, 15, 16, 17, 18, 19, 20, 21, 22, 23, 24, 25, 26, 27, 28, 29, 30, 31, 32, 33, 34, 35, 36, 37, 38, 39, 40, 41, 42, 43, 44, 45, 46, 47, 48, 49, 50, 51, 52, 53, 54, 55, 56, 57, 58, 59, 60, 61, 62, 63, 64, 65, 66, 67, 68, 69, 70, 71, 72, 73, 74, 75, 76, 77, 78, 79, 80, 81, 82, 83, 84, 85, 86, 87, 88, 89, 90, 91, 92, 93, 94, 95, 96, 07, 98, 99, 100, 150, 200, 250, 300, 350, 400, 450, 500, or more percent, relative to treatment without the vaccine.

[0182] In some embodiments, overall median survival of patients treated with the peptide vaccines of the presently disclosed subject matter is increased by a statistically significant amount, e.g., by about, or at least 1, 2, 3, 4, 5, 6, 7, 8, 9, 10, 11, 12, 13, 14, 15, 16, 17, 18, 19, 20, 21, 22, 23, 24, 25, 26, 27, 28, 29, 30, 31, 32, 33, 34, 35, 36, 37, 38, 39, 40, 41, 42, 43, 44, 45, 46, 47, 48, 49, 50, 51, 52, 53, 54, 55, 56, 57, 58, 59, 60, 61, 62, 63, 64, 65, 66, 67, 68, 69, 70, 71, 72, 73, 74, 75, 76, 77, 78, 79, 80, 81, 82, 83, 84, 85, 86, 87, 88, 89, 90, 91, 92, 93, 94, 95, 96, 97, 98, 99, 100, 150, 200, 250, 300, 350, 400, 450, 500, or more percent, relative to treatment without the vaccine. In some embodiments, the overall median survival of cancer patients and/or patients with microbial infections treated the peptide vaccines is envisioned to be about or at least 10.0, 10.25, 10.5, 10.75, 11.0, 11.25, 11.5, 11.75, 12, 12.25, 12.5, 12.75, 13, 13.25, 13.5, 13.75, 14, 14.25, 14.5, 14.75, 15, 16, 17, 18, 19, 20, 21, 22, 23, 24, 25, 26, 27, 28, 29, 30, 31, 32, 33, 34, 35, 36, or more months.

[0183] In some embodiments, tumor size of patients treated with the peptide vaccines of the presently disclosed subject matter is decreased by a statistically significant amount, e.g., by about, or by at least, 1, 2, 3, 4, 5, 6, 7, 8, 9, 10, 11, 12, 13, 14, 15, 16, 17, 18, 19, 20, 21, 22, 23, 24, 25, 26, 27, 28, 29, 30, 31, 32, 33, 34, 35, 36, 37, 38, 39, 40, 41, 42, 43, 44, 45, 46, 47, 48, 49, 50, 51, 52, 53, 54, 55, 56, 57, 58, 59, 60, 61, 62, 63, 64, 65, 66, 67, 68, 69, 70, 71, 72, 73, 74, 75, 76, 77, 78, 79, 80, 81, 82, 83, 84, 85, 86, 87, 88, 89, 90, 91, 92, 93, 94, 95, 96, 97, 98, 99, 100, 150, 200, 250, 300, 350, 400, 450, 500, or more percent, relative to treatment without the vaccine.

[0184] In some embodiments, the compositions of the presently disclosed subject matter provide an clinical tumor regression by a statistically significant amount, e.g., in about or at least 1, 2, 3, 4, 5, 6, 7, 8, 9, 10, 11, 12, 13, 14, 15, 16, 17, 18, 19, 20, 21, 22, 23, 24, 25, 26, 27, 28, 29, 30, 31, 32, 33, 34, 35, 36, 37, 38, 39, 40, 41, 42, 43, 44, 45, 46, 47, 48, 49, 50, 51, 52, 53, 54, 55, 56, 57, 58, 59, 60, 61, 62, 63, 64, 65, 66, 67, 68, 69, 70, 71, 72, 73, 74, 75, 76, 77, 78, 79, 80, 81, 82, 83, 84, 85, 86, 87, 88, 89, 90, 91, 92, 93, 94, 95, 96, 97, 98, 99, or 100 percent of patients treated with a composition of the presently disclosed subject matter.

[0185] In some embodiments, the compositions of the presently disclosed subject matter provide a CTL response specific for the cancer being treated (such as but not limited to HCC and/or malignant esophageal cancer) and/or a microbial infection by a statistically significant amount, e.g., in about or at least 1, 2, 3, 4, 5, 6, 7, 8, 9, 10, 11, 12, 13, 14, 15, 16, 17, 18, 19, 20, 21, 22, 23, 24, 25, 26, 27, 28, 29, 30, 31, 32, 33, 34, 35, 36, 37, 38, 39, 40, 41, 42, 43, 44, 45, 46, 47, 48, 49, 50, 51, 52, 53, 54, 55, 56, 57, 58, 59, 60, 61, 62, 63, 64, 65, 66, 67, 68, 69, 70, 71, 72, 73, 74, 75, 76, 77, 78, 79, 80, 81, 82, 83, 84, 85, 86, 87, 88, 89, 90, 91, 92, 93, 94, 95, 96, 97, 98, 99, or 100 percent of patients treated with a composition of the presently disclosed subject matter.

[0186] In some embodiments, the compositions of the presently disclosed subject matter provide an increase in progression free survival in the cancer being treated (e.g., HCC and/or malignant esophageal cancer), of about or at least 1, 2, 3, 4, 5, 6, 7, 8, 9, 10, 11, 12, 13, 14, 15, 16, 17, 18, 19, 20, 21, 22, 23, 24, 25, 26, 27, 28, 29, 30, 31, 32, 33, 34, 35, 36, 37, 38, 39, 40, 41, 42, 43, 44, 45, 46, 47, 48, 49, 50, 51, 52, 53, 54, 55, 56, 57, 58, 59, 60, 61, 62, 63, 64, 65, 66, 67, 68, 69, 70, 71, 72, 73, 74, 75, 76, 77, 78, 79, 80, 81, 82, 83, 84, 85, 86, 87, 88, 89, 90, 91, 92, 93, 94, 95, 96, 97, 98, 99, 100, 110, 120, 130, 140, 150, 160, 170, 180, 190, 200, 225, 250, 275, 300, 325, 350, 375, 400, 425, 450, 475, 500, or more percent compared to the progression free survival or patients not treated with the composition.

[0187] In some embodiments, progression free survival, CTL response rates, clinical tumor regression rates, tumor size, survival rates (including but not limited to overall survival rates), and/or response rates are determined, assessed, calculated, and/or estimated weekly, monthly, bi-monthly, quarterly, semi-annually, annually, and/or bi-annually over a period of about or at least 1, 2, 3, 4, 5, 6, 7, 8, 9, 10, 11, 12, 13, 14, 15 or more years or about or at least 1, 2, 3, 4, 5, 6, 7, 8, 9, 10, 11, 12, 13, 14, 15, 16, 17, 18, 19, 20, 21, 22, 23, 24, 25, 26, 27, 28, 29, 30, 31, 32, 33, 34, 35, 36, 37, 38, 39, 40, 41, 42, 43, 44, 45, 46, 47, 48, 49, 50, 51, 52, 53, 54, 55, 56, 57, 58, 59, 60, 61, 62, 63, 64, 65, 66, 67, 68, 69, 70, 71, 72, 73, 74, 75, 76, 77, 78, 79, 80, 81, 82, 83, 84, 85, 86, 87, 88, 89, 90, 91, 92, 93, 94, 95, 96, 97, 98, 99, 100, 110, 120, 130, 140, 150, 160, 170, 180, 190, 200, 225, 250, 275, 300, 325, 350, 375, 400, 425, 450, 475, 500, or more weeks.

[0188] IV.C. Compositions for Priming T cells

[0189] Adoptive cell transfer is the passive transfer of cells, in some embodiments immune-derived cells, into a recipient host with the goal of transferring the immunologic functionality and characteristics into the host. Clinically, this approach has been exploited to transfer either immune-promoting or tolerogenic cells (often lymphocytes) to patients to enhance immunity against cancer. The adoptive transfer of autologous tumor infiltrating lymphocytes (TIL) or genetically re-directed peripheral blood mononuclear cells has been used to successfully treat patients with advanced solid tumors, including melanoma and ovarian carcinoma, HCC, and/or malignant esophageal cancer (e.g., squamous cell carcinoma and/or adenocarcinoma), as well as patients with CD19-expressing hematologic malignancies. In some embodiments, adoptive cell transfer (ACT) therapies achieve T-cell stimulation ex vivo by activating and expanding autologous tumor-reactive T-cell populations to large numbers of cells that are then transferred back to the patient (see e.g., Gattinoni et al., 2006).

[0190] The peptides of the presently disclosed subject matter can in some embodiments take the form of antigen peptides formulated in a composition added to autologous dendritic cells and used to stimulate a T helper cell or CTL response in vitro. The in vitro generated T helper cells or CTL can then be infused into a patient with cancer (Yee et al., 2002), and specifically a patient with a form of cancer that expresses one or more of antigen peptides.

[0191] Alternatively or in addition, the peptides of the presently disclosed subject matter can be added to dendritic cells in vitro, with the loaded dendritic cells being subsequently transferred into an individual with cancer in order to stimulate an immune response. Alternatively or in addition, the loaded dendritic cells can be used to stimulate CD8⁺ T cells ex vivo with subsequent reintroduction of the stimulated T cells to the patient. Although a particular peptide can be identified on a particular cancer cell type, it can be found on other cancer cell types.

[0192] The presently disclosed subject matter envisions treating cancer by providing a patient with cells pulsed with a composition of peptides. The use of dendritic cells (“DCs”) pulsed with peptide antigens allows for manipulation of the immunogen in two ways: varying the number of cells injected and varying the density of antigen presented on each cell. Exemplary methods for DC-based based treatments can be found for example in Mackensen et al., 2000.

[0193] IV.D. Additional Peptides Present in Peptide Compositions

[0194] The peptide compositions (or peptide composition kits) of the presently disclosed subject matter can in some embodiments also include at least one additional peptide derived from tumor-associated antigens. Examples of tumor-associated antigens include MelanA (MART-I), gp100 (Pmel 17), tyrosinase, TRP-1, TRP-2, MAGE-1, MAGE-3, BAGE, GAGE-1, GAGE-2, p15(58), CEA, RAGE, NY-ESO (LAGE), SCP-1, Hom/Mel-40, PRAME, p53, H-Ras, HER-2/neu, BCR-ABL, E2A-PRL, H4-RET, IGH-IGK, MYL-RAR, Epstein Barr virus antigens, EBNA, human papillomavirus (HPV) antigens E6 and E7, TSP-180, MAGE-4, MAGE-5, MAGE-6, p185erbB2, p180erbB-3, c-met, nm-23H1, PSA, TAG-72-4, CA 19-9, CA 72-4, CAM 17.1, NuMa, K-ras, β-Catenin, CDK4, Mum-1, p16, TAGE, PSMA, PSCA, CT7, telomerase, 43-9F, 5T4, 791Tgp72, alpha-fetoprotein, β-HCG, BCA225, BTAA, CA 125, CA 15-3 (CA 27.29\BCAA), CA 195, CA 242, CA-50, CAM43, CD68\KP1, CO-029, FGF-5, G250, Ga733 (EpCAM), HTgp-175, M344, MA-50, MG7-Ag, MOV18, NB/70K, NY-CO-1, RCAS1, SDCCAG16, TA-90 (Mac-2 binding protein/cyclophilin C-associated protein), TAAL6, TAG72, TLP, TPS, prostatic acid phosphatase, and the like. Particular examples of additional peptides derived from tumor-associated antigens that can be employed alone or in combination with the compositions of the presently disclosed subject matter those set forth in Table 2 below.

TABLE 2
Exemplary Peptides Derived from Tumor-associated Antigens

| Polypeptide | Amino Acid Sequence^{b} | GENBANK® |
|---|---|---|
| Name^{a} | (SEQ ID NO:) | Acc. No(s).^{c} |
| CEA₆₁₋₆₉ | HLFGYSWYK (SEQ ID NO: 3924) | NP_001264092.1 |
| | | XP_005278431.1 |
| CEA₆₀₄₋₆₁₂ | YLSGADLNL (SEQ ID NO: 3925) | XP_005278431.1 |
| FBP/FOLR1₁₉₁₋₁₉₉ | EIWTHSYKV (SEQ ID NO: 3926) | NP_000793.1 |
| gp100₁₇₋₂₅ | ALLAVGATK (SEQ ID NO: 3927) | NP_001186982.1 |
| gp100₄₄₋₅₉ | WNRQLYPEWTEAQRLD | NP_008859.1 |
| | (SEQ ID NO: 3928 | |
| gp100₈₇₋₉₅ | ALNFPGSQK (SEQ ID NO: 3929) | NP_008859.1 |
| gp100₈₉₋₉₅ | SQNFPGSQK (SEQ ID NO: 3930) | NP_008859.1 |
| gp100₁₅₄₋₁₆₂ | KTWGQYWQV (SEQ ID NO: 3931_ | NP_008859.1 |
| gp100₂₀₉₋₂₁₇ | ITDQVPFSV (SEQ ID NO: 3932) | NP_008859.1 |
| gp100₂₀₉₋₂₁₇ | IMDQVPFSV (SEQ ID NO: 3933 | NP_008859.1 |
| gp100₂₈₀₋₂₈₈ | YLEPGPVTA (SEQ ID NO: 3934) | NP_008859.1 |
| gp100₄₇₆₋₄₈₅ | VLYRYGSFSV (SEQ ID NO: 3935) | NP_008859.1 |
| gp100₆₁₄₋₆₂₂ | LIYRRRLMK (SEQ ID NO: 3936) | NP_008859.1 |
| Her2/neu₃₆₉₋₃₇₇ | KIFGSLAFL (SEQ ID NO: 3937) | NP_004439.2 |
| Her2/neu₇₅₄₋₇₆₂ | VLRENTSPK (SEQ ID NO: 3938) | NP_004439.2 |
| MAGE-A1₁₁₄₋₁₂₇ | LLKYRAREPVTKAE | NP_004979.3 |
| MAGE-A2, 3, 6₁₂₁₋₁₃₄ | (SEQ ID NO: 3939) | NP_005352.1 |
| | | NP_005353.1 |
| | | NP_005354.1 |
| MAGE-A1₉₆₋₁₀₄ | SLFRAVITK (SEQ ID NO: 3940) | NP_004979.3 |
| MAGE-A1₁₆₁₋₁₆₉ | EADPTGHSY (SEQ ID NO: 3941) | NP_004979.3 |
| MAGE-A3₁₆₈₋₁₇₆ | EVDPIGHLY (SEQ ID NO: 3942) | NP_005353.1 |
| MAGE-A3₂₈₁₋₂₉₅ | TSYVKVLHHMVKISG | NP_005353.1 |
| | (SEQ ID NO: 3943) | |
| MAGE-A10₂₅₄₋₂₆₂ | GLYDGMEHL (SEQ ID NO: 3944) | NP_001011543.2 |
| MART-1/MelanA₂₇₋₃₅ | AAGIGILTV (SEQ ID NO: 3945) | NP_005502.1 |
| MART-1/MelanA₅₁₋₇₃ | RNGYRALMDKSLHVGTQCALTRR | NP_005502.1 |
| | (SEQ ID NO: 3946) | |
| MART-1/MelanA₉₇₋₁₁₆ | VPNAPPAYEKLsAEQSPPPY | NP_005502.1 |
| | (SEQ ID NO: 3947) | |
| MART-1/MelanA₉₈₋₁₀₉ | PNAPPAYEKLsA (SEQ ID NO: 3948) | NP_005502.1 |
| MART-1/MelanA₉₉₋₁₀₀ | NAPPAYEKLsAE (SEQ ID NO: 3949) | NP_005502.1 |
| MART-1/MelanA₁₀₀₋₁₀₈ | APPAYEKLs (SEQ ID NO: 3950) | NP_005502.1 |
| MART-1/MelanA₁₀₀₋₁₁₁ | APPAYEKLsAEQ (SEQ ID NO: 3951) | NP_005502.1 |
| MART-1/MelanA₁₀₀₋₁₁₄ | APPAYEKLsAEQSPP | NP_005502.1 |
| | (SEQ ID NO: 3952) | |
| MART-1/MelanA₁₀₀₋₁₁₅ | APPAYEKLsAEQSPPP | NP_005502.1 |
| | (SEQ ID NO: 3953) | |
| MART-1/MelanA₁₀₀₋₁₁₆ | APPAYEKLsAEQSPPPY | NP_005502.1 |
| | (SEQ ID NO: 3954) | |
| MART-1/MelanA₁₀₁₋₁₀₉ | PPAYEKLsA (SEQ ID NO: 3955) | NP_005502.1 |
| MART-1/MelanA₁₀₁₋₁₁₂ | PPAYEKLsAEQS (SEQ ID NO: 3956) | NP_005502.1 |
| MART-1/MelanA₁₀₂₋₁₁₀ | PAYEKLsAE (SEQ ID NO: 3957) | NP_005502.1 |
| MART-1/MelanA₁₀₂₋₁₁₃ | PAYEKLsAEQSP (SEQ ID NO: 3958) | NP_005502.1 |
| MART-1/MelanA₁₀₃₋₁₁₄ | AYEKLsAEQSPP (SEQ ID NO: 3959) | NP_005502.1 |
| MART-1/MelanA₁₀₄₋₁₁₅ | YEKLsAEQSPPP (SEQ ID NO: 3960) | NP_005502.1 |
| NY-ESO-1 | AAQERRVPR (SEQ ID NO: 3961) | AAD05203.1 |
| | | CAA10193.1 |
| NY-ESO-1 | LLGPGRPYR (SEQ ID NO: 3962) | NP_001913.2 |
| NY-ESO-1₅₃₋₆₂ | ASGPGGGAPR (SEQ ID NO: 3963) | NP_001318.1 |
| p2₈₃₀₋₈₄₄ | AQYIKANSKFIGITEL | NP_783831.1 |
| | (SEQ ID NO: 3964) | |
| TAG-1,2 | RLSNRLLLR (SEQ ID NO: 3965) | |
| Tyr₅₆₋₇₀ | AQNILLSNAPLGPQFP | NP_000363.1 |
| | (SEQ ID NO: 3966) | |
| Tyr₁₄₆₋₁₅₆ | SSDYVIPIGTY (SEQ ID NO: 3967) | NP_000363.1 |
| Tyr₂₄ₒ₋₂₅ᵢ | SDAEKSDICTDEY | NP_000363.1 |
| | (SEQ ID NO: 3968) | |
| Tyr₂₄₃₋₂₅₁ | KCDICTDEY (SEQ ID NO: 3969) | NP_000363.1 |
| Tyr₃₆₉₋₃₇₇ | YMDGTMSQV (SEQ ID NO: 3970) | NP_000363.1 |
| Tyr₃₈₈₋₄₀₆ | [sequence omitted] | NP_000363.1 |
| | (SEQ ID NO: 3971) | |

^{a}Numbers listed in subscript are the amino acids positions of the listed peptide sequence in the corresponding polypeptide including, but not limited to the amino acid sequences provided in the GENBANK® biosequence database.
^{b}lower case amino acids in this column are optionally phosphorylated.
^{c}GENBANK® biosequence database Accession Numbers listed here are intended to be exemplary only and should not be interpreted to limit the disclosed peptide sequences to only these polypeptides.

[0195] Such tumor specific peptides (including the WIC class I phosphopeptides disclosed in Tables 3-7 can be added to the peptide compositions in a manner, number, and/or in an amount as if they were an additional peptide added to the peptide compositions as described herein.

[0196] IV.E. Combination Therapies

[0197] In some embodiments, the peptide compositions (or peptide composition kits) of the presently disclosed subject matter are administered as a vaccine or in the form of pulsed cells as first, second, third, or fourth line treatment for the cancer and/or microbial infection. In some embodiments, the compositions of the presently disclosed subject matter are administered to a patient in combination with one or more therapeutic agents, e.g., anti-CA125 (or oregovomab Mab B43.13), anti-idiotype Ab (ACA-125), anti-HER-2 (trastuzumab, pertuzumab), anti-MUC-1 idiotypic Ab (HMFG1), HER-2/neu peptide, NY-ESO-1, anti-Programed Death-1 (“PD1”) (or PD1-antagonists such as BMS-936558), anti-CTLA-4 (or CTLA-4 antagonists), vermurafenib, ipilimumab, dacarbazine, IL-2, IFN-α, IFN-γ, temozolomide, receptor tyrosine kinase inhibitors (e.g., imatinib, gefitinib, erlotinib, sunitinib, tyrphostins, telatinib), sipileucel-T, tumor cells transfected with GM-CSF, a platinum-based agent, a taxane, an alkylating agent, an antimetabolite and/or a vinca alkaloid or combinations thereof. In an embodiment, the cancer is sensitive to or refractory, relapsed or resistant to one or more chemotherapeutic agents, e.g., a platinum-based agent, a taxane, an alkylating agent, an anthracycline (e.g., doxorubicin (e.g., liposomal doxorubicin)), an antimetabolite and/or a vinca alkaloid. In some embodiments, the cancer is, e.g., HCC, and the HCC is refractory, relapsed, or resistant to a platinum-based agent (e.g., carboplatin, cisplatin, oxaliplatin), a taxane (e.g., paclitaxel, docetaxel, larotaxel, cabazitaxel) and/or an anthracycline (e.g., doxorubicin (e.g., liposomal doxorubicin)). In some embodiments, the cancer is, e.g., HCC, and the HCC is refractory, relapsed, or resistant to an antimetabolite (e.g., an antifolate (e.g., pemetrexed, floxuridine, raltitrexed) and a pyrimidine analogue (e.g., capecitabine, cytrarabine, gemcitabine, 5FU)) and/or a platinum-based agent (e.g., carboplatin, cisplatin, oxaliplatin). In some embodiments, the cancer is, e.g., lung cancer, and the cancer is refractory, relapsed or resistant to a taxane (e.g., paclitaxel, docetaxel, larotaxel, cabazitaxel), a platinum-based agent (e.g., carboplatin, cisplatin, oxaliplatin), a vinca alkaloid (e.g., vinblastine, vincristine, vindesine, vinorelbine), a vascular endothelial growth factor (VEGF) pathway inhibitor, an epidermal growth factor (EGF) pathway inhibitor) and/or an antimetabolite (e.g., an antifolate (e.g., pemetrexed, floxuridine, raltitrexed) and a pyrimidine analogue (e.g., capecitabine, cytrarabine, gemcitabine, 5FU)). In some embodiments, the cancer is, e.g., breast cancer, and the cancer is refractory, relapsed or resistant to a taxane (e.g., paclitaxel, docetaxel, larotaxel, cabazitaxel), a vascular endothelial growth factor (VEGF) pathway inhibitor, an anthracycline (e.g., daunorubicin, doxorubicin (e.g., liposomal doxorubicin), epirubicin, valrubicin, idarubicin), a platinum-based agent (e.g., carboplatin, cisplatin, oxaliplatin), and/or an antimetabolite (e.g., an antifolate (e.g., pemetrexed, floxuridine, raltitrexed) and a pyrimidine analogue (e.g., capecitabine, cytrarabine, gemcitabine, 5FU)). In some embodiments, the cancer is, e.g., gastric cancer, and the cancer is refractory, relapsed or resistant to an antimetabolite (e.g., an antifolate (e.g., pemetrexed, floxuridine, raltitrexed) and a pyrimidine analogue (e.g., capecitabine, cytrarabine, gemcitabine, 5FU)) and/or a platinum-based agent (e.g., carboplatin, cisplatin, oxaliplatin). In some embodiments, an antimicrobial and/or an antiviral is administered to the patient.

[0198] In some embodiments, the peptide compositions (or peptide composition kits) of the presently disclosed subject matter are associated with agents that inhibit T cell apoptosis or anergy thus potentiating a T cell response (“T cell potentiator”). Such agents include B7RP1 agonists, B7-H3 antagonists, B7-H4 antagonists, HVEM antagonists, HVEM antagonists, GALS antagonists or alternatively CD27 agonists, OX40 agonists, CD137 agonists, BTLA agonists, ICOS agonists CD28 agonists, or soluble versions of PDL1, PDL2, CD80, CD96, B7RP1, CD137L, OX40 or CD70. See Pardoll, 2012.

[0199] In some embodiments, the T cell potentiator is a PD1 antagonist. Programmed death 1 (PD1) is a key immune checkpoint receptor expressed by activated T cells, and it mediates immunosuppression. PD1 functions primarily in peripheral tissues, where T cells can encounter the immunosuppressive PD1 ligands PD-L1 (B7-H1) and PD-L2 (B7-DC), which are expressed by tumor cells, stromal cells, or both. In some embodiments, the anti-PD1 monoclonal antibody BMS-936558 (also known as MDX-1106 and ONO-4538) is used. In some embodiments, the T cell potentiator, e.g., PD1 antagonist, is administered as an intravenous infusion at least or about every 1, 1.5, 2, 2.5, 3, 3.5, or 4 weeks of each 4, 5, 6, 7, 8, 9, or 10-week treatment cycle of about for at least 1, 2, 3, 4, 5, 6, 7, 8, 9, 10, 11, 12, 13, 14, 15, 16, 17, 18, 19, 20, or more cycles. Exemplary, non-limiting doses of the PD1 antagonists are envisioned to be exactly, about, or at least 0.1, 0.2, 0.3, 0.4, 0.5, 0.6, 0.7, 0.8, 0.9, 1, 2, 3, 4, 5, 6, 7, 8, 9, 10, 11, 12, 13,14, 15, 16, 17, 18, 19, 20, or more mg/kg (see Brahmer et al., 2012).

[0200] The exemplary therapeutic agents disclosed herein above are envisioned to be administered at a concentration of, e.g., about 1 to 100 mg/m², about 10 to 80 mg/m², about 40 to 60 mg/m², e.g., about 1, 2, 3, 4, 5, 6, 7, 8, 9, 10, 11, 12, 13, 14, 15, 16, 17, 18, 19, 20, 21, 22, 23, 24, 25, 26, 27, 28, 29, 30, 31, 32, 33, 34, 35, 36, 37, 38, 39, 40, 41, 42, 43, 44, 45, 46, 47, 48, 49, 50, 51, 52, 53, 54, 55, 56, 57, 58, 59, 60, 61, 62, 63, 64, 65, 66, 67, 68, 69, 70, 71, 72, 73, 74, 75, 76, 77, 78, 79, 80, 81, 82, 83, 84, 85, 86, 87, 88, 89, 90, 91, 92, 93, 94, 95, 96, 97, 98, 99, 100, or more mg/mm². Alternatively, the exemplary therapeutic agents disclosed herein above are envisioned to be administered at a concentration of, e.g., about or at least 0.001 to 100 mg/kg or 0.1 to 1 mg/kg. In some embodiments, the exemplary therapeutic agents disclosed herein above are envisioned to be administered at a concentration of, e.g., about or at least from 0.01 to 10 mg/kg.

[0201] The peptide compositions (or peptide composition kits) of the presently disclosed subject matter can in some embodiments also be provided with administration of cytokines such as lymphokines, monokines, growth factors and traditional polypeptide hormones. Included among the cytokines are growth hormones such as human growth hormone, N-methionyl human growth hormone, and bovine growth hormone; parathyroid hormone; thyroxine; insulin; proinsulin; relaxin; prorelaxin; glycoprotein hormones such as follicle stimulating hormone (FSH), thyroid stimulating hormone (TSH), and luteinizing hormone (LH); hepatic growth factor; prostaglandin, fibroblast growth factor; prolactin; placental lactogen, OB protein; tumor necrosis factor-alpha and -beta; mullerian-inhibiting substance; mouse gonadotropin-associated peptide; inhibin; activin; vascular endothelial growth factor; integrin; thrombopoietin (TPO); nerve growth factors such as NGF-beta; platelet-growth factor; transforming growth factors (TGFs) such as TGF-alpha and TGF-beta; insulin-like growth factor-I and -II; erythropoietin (EPO); osteoinductive factors; interferons such as interferon-alpha -beta, and -gamma; colony stimulating factors (CSFs) such as macrophage-CSF (M-CSF); granulocyte-macrophage-CSF (GM-CSF); and granulocyte-CSF (G-CSF); interleukins (ILs) such as IL-1, IL-1 alpha, IL-2, IL-3, IL-4, IL-5, IL-6, IL-7, IL-8, IL-9, IL-10, IL-11, IL-12; IL-13, IL-14, IL-15, IL-16, IL-17, IL-18, LIF, G-CSF, GM-CSF, M-CSF, EPO, kit-ligand or FLT-3, angiostatin, thrombospondin, endostatin, tumor necrosis factor and LT. As used herein, the term cytokine includes proteins from natural sources or from recombinant cell culture and biologically active equivalents of the native sequence cytokines.

[0202] The peptide compositions of the presently disclosed subject matter can in some embodiments be provided with administration of cytokines around the time, (e.g., about or at least 1, 2, 3, or 4 weeks or days before or after) of the initial dose of a peptide composition.

[0203] Exemplary, non-limiting doses of a cytokine would be about or at least 1-100, 10-80, 20-70, 30-60, 40-50, or 1, 2, 3, 4, 5, 6, 7, 8, 9, or 10 Mu/m²/day over about or at least 1, 2, 3, 4, 5, 6, 7, 8, 9, 10, 11, 12, 13, 14, 15, 16, 17, 18, 19, 20, 21, 22, 23, 24, 25, 26, 27, 28, 29, 30, 31, 32, 33, 34, 35, 36, 37, 38, 39, 40, 41, 42, 43, 44, 45, 46, 47, 48, 49, 50, 51, 52, 53, 54, 55, 56, 57, 58, 59, 60, 61, 62, 63, 64, 65, 66, 67, 68, 69, or 70 days. The cytokine can in some embodiments be delivered at least or about once every 1, 2, 3, 4, 5, 6, 7, 8, 9, 10, 11, 12, 13, 14, 15, 16, 17, 18, 19, 20, 21, 22, 23, or 24 hours. Cytokine treatment can in some embodiments be provided in at least or about 1, 2, 3, 4, 5, 6, 7, 8, 9, 10, 11, 12, 13, 14, 15, 16, 17, 18, 19, 20, 21, 22, 23, 24, 25, 26, 27, 28, 29, or 30 cycles of at least or about 1, 2, 3, 4, 5, 6, 7, 8, 9, or 10 weeks, wherein each cycle has at least or about 1, 2, 3, 4, 5, 6, 7, 8, 9, 10, 11, 12, 13, 14, 15, 16, 17, 18, 19, 20, 21, 22, 23, 24, 25, 26, 27, 28, 29, or 30 cytokine doses. Cytokine treatment can be on the same schedule as administration of the peptide compositions or on a different (but in some embodiments overlapping) schedule.

[0204] In some embodiments, the cytokine is IL-2 and is dosed in an amount of about or at least 100,000 to 1,000,000; 200,000-900,000; 300,000-800,000; 450,000-750,000; 600,000-800,000; or 700,000-800,000; or 720,000 units (IU)/kg administered, e.g., as a bolus, every 1, 2, 3, 4, 5, 6, 7, 8, 9, 10, 11, 12, 13, 14, 15, 16, 17, 18, 19, or 20 hours for 1, 2, 3, 4, 5, 6, 7, 8, 9, 10, 11, 12, 13, or 14 days, in a cycle, for example.

### V. Types of Diseases, Disorders, and Conditions

[0205] The compositions of the presently disclosed subject matter are envisioned to useful in the treatment of benign and malignant proliferative diseases and microbial infections. Excessive proliferation of cells and turnover of cellular matrix can contribute significantly to the pathogenesis of several diseases, including but not limited to cancer, atherosclerosis, rheumatoid arthritis, psoriasis, idiopathic pulmonary fibrosis, scleroderma and cirrhosis of the liver, ductal hyperplasia, lobular hyperplasia, papillomas, and others.

[0206] In some embodiments, the proliferative disease is cancer, which in some embodiments is selected from the group consisting of HCC, esophageal cancer, breast cancer, colorectal cancer, squamous carcinoma of the lung, sarcoma, renal cell carcinoma, pancreatic carcinomas, squamous tumors of the head and neck, leukemia, brain cancer, liver cancer, prostate cancer, ovarian cancer, and cervical cancer. In some embodiments, the compositions of the presently disclosed subject matter are used to treat HCC, esophageal cancer, colorectal cancer, acute myelogenous leukemia (AML), acute lymphocytic leukemia (ALL), chronic lymphocytic lymphoma (CLL), chronic myelogenous leukemia (CML), breast cancer, renal cancer, pancreatic cancer, and/or ovarian cancer.

[0207] In some embodiments, the cancer is a cancer of the bladder (including accelerated and metastatic bladder cancer), breast (e.g., estrogen receptor positive breast cancer, estrogen receptor negative breast cancer, HER-2 positive breast cancer, HER-2 negative breast cancer, triple negative breast cancer, inflammatory breast cancer), colon (including colorectal cancer), kidney (e.g., renal cell carcinoma), liver, lung (including small cell lung cancer and non-small cell lung cancer (including adenocarcinoma, squamous cell carcinoma, bronchoalveolar carcinoma and large cell carcinoma)), genitourinary tract, e.g., ovary (including fallopian, endometrial and peritoneal cancers), cervix, prostate and testes, lymphatic system, rectum, larynx, pancreas (including exocrine pancreatic carcinoma), stomach (e.g., gastroesophageal, upper gastric or lower gastric cancer), gastrointestinal cancer (e.g., anal cancer), gall bladder, thyroid, lymphoma (e.g., Burkitt's, Hodgkin's, or non-Hodgkin's lymphoma), leukemia (e.g., acute myeloid leukemia), Ewing's sarcoma, nasoesophageal cancer, nasopharyngeal cancer, neural and glial cell cancers (e.g., glioblastoma multiforme), and head and neck. Exemplary cancers include but are not limited to HCC, esophageal cancer (including Barrett's esophagus (BE), high-grade dysplasia (HGD), and invasive cancer including but not limited to squamous cell carcinoma and adenocarcinoma), melanoma, breast cancer (e.g., metastatic or locally advanced breast cancer), prostate cancer (e.g., hormone refractory prostate cancer), renal cell carcinoma, lung cancer (e.g., small cell lung cancer and non-small cell lung cancer (including adenocarcinoma, squamous cell carcinoma, bronchoalveolar carcinoma and large cell carcinoma)), pancreatic cancer, gastric cancer (e.g., gastroesophageal, upper gastric or lower gastric cancer), colorectal cancer, squamous cell cancer of the head and neck, ovarian cancer (e.g., advanced ovarian cancer, platinum-based agent resistant or relapsed ovarian cancer), lymphoma (e.g., Burkitt's, Hodgkin's, or non-Hodgkin's lymphoma), leukemia (e.g., acute myeloid leukemia), and gastrointestinal cancer.

[0208] In some embodiments, the compositions and methods of the presently disclosed subject matter are for use in treating microbial infections. Exemplary microbes that can be treated with the compositions and methods of the presently disclosed subject matter include at least the following:

[0209] Hepatitis C and B viruses. Worldwide, there are 140 million and more than 250 million people chronically infected with hepatitis C virus (HCV) and hepatitis B virus, (HBV), respectively. Both viruses can cause hepatocellular cancer. HCV consists of a single stranded RNA (9600 nucleotide bases) surrounded by a protected shell of proteins. The viral RNA codes for a single polyprotein (˜3,000 AA) that is post-translationally cleaved into two highly glycosylated structural proteins, E1 and E2, a transmembrane protein p7, and six non-structural accessory proteins, NS2, NS3, NS4A, NS4B, NS5A, and NS5B.

[0210] HCV does not integrate its genome into the host chromosomal DNA. It does exhibit a high mutational rate and does deregulate many host cellular processes. Accessory protein NS5B forms a complex with the retinoblastoma tumor suppressor protein (pRb) that is then targeted for degradation in the proteasome following ubiquitination by the E6-associated protein (E6AP). Expression of another member of the pRb family, p130, is downregulated by HCV core protein that triggers hyper-methylation of the promoter region of the corresponding gene. Accessory protein NS2 sequesters p53 to the cytoplasm and prevents it from monitoring DNA damage and triggering cell apoptosis. The expected result would be high levels of gene transcription including likely production of cancerous inhibitor of PP2A (CIP2A; also called cellular inhibitor of PP2A) and uncontrolled cell division. Partially at odds with this expectation are data that suggest a third accessory protein, NS5A, functions as a PP2A regulatory protein that enhances a particular PP2A activity and partially reduces protein phosphorylation.

[0211] The hepatitis B virus (HBV) is a partially double-stranded DNA virus that replicates via reverse transcription. The two DNA chains contain ˜3200 and ˜2300 nucleotides, respectively. The genome contains four overlapping reading frames that code for the viral coat protein (capsid), surface proteins (envelope), reverse transcriptase, and the small (17.4 kDa), regulatory oncoprotein, HBx. Integration of HBV into the host hepatocyte genome is a frequent event in HCC (86.4%). HBx activates the E2F1 group of transcription factors by upregulating kinases that phosphorylate and inactivate pRb. The result is high levels of transcription and likely generation of the PP2A inhibitor CIP2A. A number of reports also indicate that HBx blocks apoptosis of HBV infected cells by several different mechanisms. Since PP2A is largely inhibited by both viruses, as disclosed herein many of the same class I MHC phosphopeptide antigens that have been identified on multiple cancers have also been identified on HCV- and HBV-infected cells.

[0212] Human Papillomavirus, HPV. Human papillomavirus (HPV) infects the basal cells of human epithelia and is the main causative agent for a large number of human tumors including cervical, head and neck, plus oral cancers. Although close to 200 different HPV types have been described, two variants, HPV-16 and HPV-18, are the types most often found in cervical cancer, the second most common cancer in women worldwide. The HPV-16 and 18 variants contain a small, double stranded DNA that encodes six regulatory proteins, (E1, E2, E4, E5, E6, and E7) and two structural proteins (L1 and L2). The initial stage of the infection occurs in the basal layer of undifferentiated epithelial cells and the virus is confined to the cell nucleus as an episome (host and viral DNA remain separate). Viral replication, facilitated by E1 and E2 and the host machinery, occurs at a slow rate without cell lysis or inflammation to avoid detection by the immune system.

[0213] To keep the cellular replication machinery active, the virus employs three of the other accessary proteins, E5, E6, and E7. All are oncogenic and of particular interest because of the roles they play in cancer development. E7 is a 98 residue phosphoprotein that binds to the active, unphosphorylated form of pRb (plus related proteins p130 and p107) and targets them for degradation in the proteasome. Active pRb binds and inactivates the E2F1-3 family of transcription factors and thus keeps the cell in a quiescent state. In the absence of pRb, the cell is free to undergo uncontrolled growth and proliferation. The accessary protein, E6, upregulates the DNA cytosine deaminase, APOBEC3B (A3B), an enzyme that converts cytosine to uracil and causes hypermutation of the viral DNA. Normally, this would activate the tumor suppressor protein, p53, to trigger apoptosis. Unfortunately, the 158 residue HPV E6 accessory protein and a cellular protein, E6AP, form a complex that allows them to bind p53 and target it for ubiquitination and degradation in the proteasome. During this period of the infection, multiple copies of the viral DNA that encode the oncoproteins, E6 and E7, become integrated into the host genome and replicate independently of the virus.

[0214] The third HPV accessary oncoprotein, E5, is a small 83 residue protein that localizes primarily to the endoplasmic reticulum and Golgi apparatus and plays a key role in regulating important growth factors and other proteins involved in control of cell differentiation, survival and growth. E5 also down regulates expression of class I and class II MHC molecules. Early studies concluded that the E5 protein is responsible for lack of acidification of the Golgi apparatus and for binding and prevention of class I molecules being transported to the cell surface. HPV-16 E5 was shown to selectively downregulate HLA-A and HLA-B presentation but had no effect on HLA-C and E molecules. Fortunately, viral DNA for the E5 oncoprotein is usually not incorporated into the host genome. As a result, levels of this protein in the transformed cells are expected to be much less than in the cells of the initial infection.

[0215] Note that when the E7 protein targets pRb for degradation, E2F1, a member of the E2F1-3 transcription factor family that was repressed by pRb, now becomes activated and upregulates expression of CIP2A. Inhibition of PP2A would thus be expected to dramatically increase the level and lifetime of phosphorylated proteins in the diseased cell and thus give rise to enhanced presentation of disease-specific, class I MHC phosphopeptides. Many of these phosphopeptides are expected to be the same as those that we have already identified on HLA A, B, and C alleles expressed on multiple types of cancer cells.

[0216] Epstein Barr Virus (EBV). More than 90% of adults in the world have been infected with the Epstein Barr Virus (EBV; also known as human herpesvirus 4, (HHV-4)) and most continue to have a lifelong dormant infection. EBV infects both B cells and epithelial cells. The reservoir for the latent virus is primarily resting, central memory, B-cells. EBV is known to cause infectious mononucleosis as well as a variety of cancers such as Hodgkin's lymphoma, Burkitt's lymphoma, gastric cancer, and nasopharyngeal carcinoma.

[0217] The virus is composed of a double DNA helix that codes for 85 proteins and is surrounded by a protein nucleocapsid and an envelope of both lipids and glycoproteins. Regulatory proteins of note include six nuclear antigens (EBNA-1, -2, -3A, -3B, 3C and the EBV nuclear antigen-leader protein EBNA-LP), plus three EBV latent membrane proteins (LMP-1, -2A, and -2B). EBNA-3C (also known as EBNA-6) binds the mitochondrial ribosomal protein MRPS18-2 and targets it to the nucleus where it binds to pRb and liberates the E2F1 group of transcription factors. EBNA-3C can also recruit the SCF^{Skp2} ubiquitin ligase complex which then mediates ubiquitination and degradation of pRb. High levels of transcription result. EBNA-3C also enhances the intrinsic ubiquitin ligase activity of Mdm2 toward p53, which in turn facilitates p53 ubiquitination and degradation.

[0218] Here as well, presentation of class I MHC phosphopeptides on the cell surface can result from targeting of pRb and p53 for degradation in the proteasome in order to liberate transcription factors that upregulate expression of PP2A protein inhibitors (e.g., SET and CIP2A). These inhibitors dramatically enhance the lifetime of phosphorylated proteins so that they can be degraded in the proteasome and unique phosphopeptide antigens can be presented on the cell surface by class I MHC molecules. When the immune system uses these antigens to defeat the virus, EBV is eliminated or becomes dormant, and memory T-cells are generated that can recognize other virus infections or cancer that express the same phosphopeptide antigens.

[0219] Merkel Cell Polyomavirus (MCPyV). MCPyV has a small (5,387 bp) double stranded DNA genome that codes for two viral coat proteins (VP1 and VP2) and four accessary proteins including a large tumor antigen (LT) and small tumor antigen (ST). The virus is the causative agent for Merkel cell carcinoma (MCC), a highly aggressive but rare skin cancer. Estimated cases of MCC per year number about 16,000. Most tumors are detected in the elderly or immunocompromised patients and are found on the head and neck area where the virus and skin are exposed to ultraviolet radiation. MCC results when viral DNA encoding ST and a mutated/truncated version of LT are incorporated into and expressed by the host genome.

[0220] This truncated version of LT is missing its DNA binding and growth suppressor domains but still contains the LXCXE motif that allows it to bind and inactivate pRb. This allows the cell to undergo uncontrolled proliferation. Full-length MCPyV LT represses transcription of p53 and thus blocks apoptosis. MCPyV ST displaces the regulatory protein B56a from active PP2A and likely competes with other regulatory B subunits for assembly of the intact holoenzyme. Again, these conditions are expected to result in the presentation of class I MHC phosphopeptide antigens that have already been observed on multiple cancers.

[0221] In addition, it is noted that MCPyV ST up-regulates glycolytic and metabolite transport genes including the major monocarboxylate transporter SLC16A1. This causes cells to convert pyruvate to lactate resulting in aerobic glycolysis, known as the Warburg effect. Generation of disease specific O-GlcNAcylated class I MHC peptides is predicted to result from this phenomenon, this type of class I MHC peptide antigen has been shown to be capable of generating strong memory T-cell responses in healthy blood donors.

[0222] Human Immunodeficiency Virus (HIV-1). HIV-1 is a retrovirus that infects CD4⁺ T-cells (T-helper cells), macrophages, and dendritic cells, eventually leading to the development of AIDS. More than 40 million people worldwide are infected with the virus.

[0223] HIV-1 is composed of two copies of single stranded RNA that codes for 16 proteins. Four HIV coded accessory proteins, Vif, Vpr, Nef, and Vpu, share the ability to target cellular proteins for proteasomal degradation and are essential for pathogenesis in vivo. Particularly relevant here is the recent discovery that the accessory protein Vif is necessary and sufficient for culin-5 (CUL5)-dependent ubiquitination and proteasomal degradation of all members of the B56 family of regulatory subunits (PPP2R-A, -B, -C, -D, and -E) of PP2A. Inhibition of PP2A by Vif produced hyperphosphorylation of cellular proteins that mirrored previously reported changes seen when PP2A in transformed cells was treated with the small molecule inhibitor okadaic acid. These observations suggest that HIV-1 infected cells should present numerous class I MHC phosphopeptide antigens.

[0224] Another HIV accessory protein, Nef, is known to subvert the host cellular trafficking machinery and to mediate down regulation of Class I/II MHC presentation on HIV infected cells. Rate of progression to AIDS seems to correlate with the extent of down regulation of MHC presentation. Since removal of all class I MHC proteins from the cell surface would expose the infected cell to attack by natural killer (NK) cells, the HIV virus has evolved to only suppress presentation of class I HLA-A and HLA-B proteins. Results of another study indicate that Nef is much more effective at suppression of HLA-A alleles than it is for HLA-B alleles. Presentation of HLA-C and E is not affected.

[0225] It is thus expected that class I MEW phosphopeptides presented by HLA A, B, and C alleles on cell lines that have been infected with HIV-1 could reflect data that has already been generated from the same alleles on multiple cancers.

[0226] Coronavirus. There are seven types coronaviruses (CoV) that can infect humans. Of particular interest are MERS-CoV (the beta coronavirus that causes Middle East Respiratory Syndrome, or MERS), SARS-CoV (the beta coronavirus that causes severe acute respiratory syndrome, or SARS), and SARS-CoV-2 (the novel coronavirus that causes coronavirus disease 2019, or COVID-19). The genome of SARS-CoV encodes the protein Nsp15 that has been shown to bind to and inhibit pRb1. This is expected to result in enhanced expression of CIP2A leading to high level expression of class I MEW phosphopeptides on viral infected cells. SARS-CoV-2's genome also encodes a Nsp15 protein and its amino acid sequence is 89% the same as that for corresponding SARS-CoV protein. As such, class I MHC phosphopeptides are expected to be expressed on coronavirus-infected cells, including cells infected with MERS-CoV, SARS-CoV, and SARS-CoV-2.

[0227] Helicobacter Pylori Bacterium (H. pylori). H. pylori is a gram-negative bacteria that colonizes the gastric epithelium and causes gastric cancer. Today, the disease is responsible for 700,000 deaths/year. About half the people in the world are presently infected with H. pylori but only a small percentage of the population ends up with cancer. Particularly virulent strains of the virus all code for the 120-140 kDa accessary protein, CagA, that can be translocated into host cells during bacterial attachment. CagA is phosphorylated on certain pentapeptide sequences near the C-terminus and can then recruit 20 of more binding partners and disrupt numerous signaling pathways in the host cell. CagA binds to E-cadherin and displaces β-catenin that then upregulates transcription in the host cell. This is expected to result in overexpression of CIP2A, high levels of long lived protein phosphorylation, and presentation of phosphopeptides on the surface of infected cells.

[0228] Fusobacterium nucleatum (Fn). Fusobacterium nucleatum (Fn) is a gram negative anaerobe that is usually found in the oral cavity and plays a key role in the development of dental plaque. Unfortunately, it also flourishes outside the oral cavity and is responsible for many infections. It is also known to promote colorectal carcinogenesis by modulating E-cadherin/β-catenin signaling. The Fn genome codes for a protein, FadA, that binds to E-cadherin on colorectal cells and mediates attachment and invasion of the bacterium. Both FadA and the Fn lipopolysaccharide have been reported to activate β-catenin signaling that upregulates transcription. This results in upregulation of CIP2A and inhibition of PP2A, resulting in high levels of phosphorylated proteins with long half-lives. Accordingly, the same phosphopeptide antigens that have been observed on multiple cancers would be expected to presented on Fn infected cells.

### VI. Administration of Compositions

[0229] The peptide compositions of the presently disclosed subject matter can in some embodiments be administered parenterally, systemically, and/or topically. By way of example and not limitation, composition injection can be performed by intravenous (i.v).

[0230] injection, sub-cutaneous (s.c). injection, intradermal (i.d). injection, intraperitoneal (i.p). injection, and/or intramuscular (i.m). injection. One or more such routes can be employed. Parenteral administration can be, for example, by bolus injection or by gradual perfusion over time. Alternatively or concurrently, administration can be by the oral route.

[0231] In some embodiments, intradermal (i.d). injection is employed. The peptide compositions of the presently disclosed subject matter are suitable for administration of the peptides by any acceptable route such as oral (enteral), nasal, ophthal, or transdermal. In some embodiments, the administration is subcutaneous and can be administered by an infusion pump.

[0232] Pharmaceutical carriers, diluents, and excipients are generally added to the peptide compositions or (peptide compositions kits) that are compatible with the active ingredients and acceptable for pharmaceutical use. Examples of such carriers include, but are not limited to, water, saline solutions, dextrose, and/or glycerol. Combinations of carriers can also be used. The vaccine compositions can further incorporate additional substances to stabilize pH and/or to function as adjuvants, wetting agents, and/or emulsifying agents, which can serve to improve the effectiveness of the vaccine.

[0233] The peptide compositions can include one or more adjuvants such but not limited to montanide ISA-51 (Seppic, Inc., Fairfield, N.J., United States of America); QS-21 STIMULON® brand adjuvant (Agenus Inc., Lexington, Mass., United States of America); ARLACEL® A brand mannide monooleate; oeleic acid; tetanus helper peptides (e.g., QYIKANSKFIGITEL (SEQ ID NO: 3972) or AQYIKANSKFIGITEL (SEQ ID NO: 3973); GM-CSF; cyclophosphamide; bacillus Calmette-Guerin (BCG); corynbacterium parvum; levamisole, azimezone; isoprinisone; dinitrochlorobenezene (DNCB); keyhole limpet hemocyanins (KLH) including Freunds adjuvant (complete and incomplete); mineral gels; aluminum hydroxide (Alum); lysolecithin; pluronic polyols; polyanions; peptides; oil emulsions; nucleic acids (e.g., dsRNA) dinitrophenol; diphtheria toxin (DT); toll-like receptor (TLR, e.g., TLR3, TLR4, TLR7, TLR8 or TLR9) agonists (e.g, endotoxins such as lipopolysaccharide (LPS); monophosphoryl lipid A (MPL); polyinosinic-polycytidylic acid (poly-ICLC/HILTONOL®; Oncovir, Inc., Wash., DC, United States of America); IMO-2055; glucopyranosyl lipid A (GLA); QS-21—a saponin extracted from the bark of the Quillaja saponaria tree, also known as the soap bark tree or Soapbark; resiquimod (TLR7/8 agonist), CDX-1401—a fusion protein consisting of a fully human monoclonal antibody with specificity for the dendritic cell receptor DEC-205 linked to the NY-ESO-1 tumor antigen; Juvaris' Cationic Lipid-DNA Complex; Vaxfectin; and combinations thereof.

[0234] Polyinosinic-Polycytidylic acid (Poly IC) is a double-stranded RNA (dsRNA) that acts as a TLR3 agonist. To increase half-life, it has been stabilized with polylysine and carboxymethylcellulose as poly-ICLC. It has been used to induce interferon in cancer patients, with intravenous doses up to 300 μg/kg. Like poly-IC, poly-ICLC is a TLR3 agonist. TLR3 is expressed in the early endosome of myeloid DC; thus poly ICLC preferentially activates myeloid dendritic cells, thus favoring a Th1 cytotoxic T-cell response. Poly ICLC activates natural killer (NK) cells, induces cytolytic potential, and induces IFN-gamma from myeloid DC.

[0235] In some embodiments, the adjuvant is provided at about or at least 10, 20, 30, 40, 50, 60, 70, 80, 90, 100, 110, 120, 130, 140, 150, 160, 170, 180, 190, 200, 210, 220, 230, 240, 250, 260, 270, 280, 290, 300, 310, 320, 330, 340, 350, 360, 370, 380, 390, 400, 410, 420, 430, 440, 450, 460, 470, 480, 490, 500, 510, 520, 530, 540, 550, 560, 570, 580, 590, 600, 610, 620, 630, 640, 650, 660, 670, 680, 690, 700, 710, 720, 730, 740, 750, 760, 770, 780, 790, 800, 810, 820, 830, 840, 850, 860, 870, 880, 890, 900, 910, 920, 930, 940, 950, 960, 970, 980, 990, or 1000 micrograms per dose or per kg in each dose. In some embodiments, the adjuvant is provided at least or about 0.1, 0.2, 0.3, 0.40, 0.50, 0.60, 0.70, 0.80, 0.90, 0.100, 1.10, 1.20, 1.30, 1.40, 1.50, 1.60, 1.70, 1.80, 1.90, 2.00, 2.10, 2.20, 2.30, 2.40, 2.50, 2.60, 2.70, 2.80, 2.90, 3.00, 3.10, 3.20, 3.30, 3.40, 3.50, 3.60, 3.70, 3.80, 3.90, 4.00, 4.10, 4.20, 4.30, 4.40, 4.50, 4.60, 4.70, 4.80, 4.90, 5.00, 5.10, 5.20, 5.30, 5.40, 5.50, 5.60, 5.70, 5.80, 5.90, 6.00, 6.10, 6.20, 6.30, 6.40, 6.50, 6.60, 6.70, 6.80, 6.90, 7.00, 7.10, 7.20, 7.30, 7.40, 7.50, 7.60, 7.70, 7.80, 7.90, 8.00, 8.10, 8.20, 8.30, 8.40, 8.50, 8.60, 8.70, 8.80, 8.90, 9.00, 9.10, 9.20, 9.30, 9.40, 9.50, 9.60, 9.70, 9.80, or 9.90 grams per dose or per kg in each dose. In some embodiments, the adjuvant is given at about or at least 10, 15, 20, 25, 50, 75, 100, 125, 150, 175, 150, 175, 200, 225, 250, 275, 300, 325, 350, 375, 400, 425, 450, 500, 525, 550, 575, 600, 625, 675, 700, 725, 750, 775, 800, 900, 1000, 1100, 1200, 1300, 1400, 1500, 1600, 1700, 1800, 1900, or 2000 endotoxin units (“EU”) per dose.

[0236] The peptide compositions of the presently disclosed subject matter can in some embodiments be provided with an administration of cyclophosphamide around the time, (e.g., about or at least 1, 2, 3, or 4 weeks or days before or after) the initial dose of a peptide composition. An exemplary dose of cyclophosphamide would in some embodiments be about or at least 100, 200, 300, 400, 500, 600, 700, 800, 900, or 1000 mg/m²/day over about or at least 1, 2, 3, 4, 5, 6, 7, 8, 9, or 10 days.

[0237] The compositions of the presently disclosed subject matter can in some embodiments comprise the presently disclosed peptides in the free form and/or in the form of a pharmaceutically acceptable salt.

[0238] As used herein, “a pharmaceutically acceptable salt” refers to a derivative of the disclosed peptides wherein the peptide is modified by making acid or base salts of the peptide. For example, acid salts are prepared from the free base (typically wherein the neutral form of the drug has a neutral —NH₂ group) involving reaction with a suitable acid. Suitable acids for preparing acid salts include both organic acids such as but not limited to acetic acid, propionic acid, glycolic acid, pyruvic acid, oxalic acid, malic acid, malonic acid, succinic acid, maleic acid, fumaric acid, tartaric acid, citric acid, benzoic acid, cinnamic acid, mandelic acid, methanesulfonic acid, ethanesulfonic acid, p-toluenesulfonic acid, salicylic acid, and the like, as well as inorganic acids such as but not limited to hydrochloric acid, hydrobromic acid, sulfuric acid, nitric acid, phosphoric acid, and the like. Conversely, basic salts of acid moieties which can be present on a peptide are prepared using a pharmaceutically acceptable base such as sodium hydroxide, potassium hydroxide, ammonium hydroxide, calcium hydroxide, trimmethylamine or the like. By way of example and not limitation, the compositions can in some embodiments comprise the peptides as salts of acetic acid (acetates), ammonium, or hydrochloric acid (chlorides).

[0239] In some embodiments, a composition can include one or more sugars, sugar alcohols, amino acids such a glycine, arginine, glutaminic acid, and others as framework former. The sugars can be mono-, di- or trisaccharide. These sugars can be used alone, as well as in combination with sugar alcohols. Examples of sugars include glucose, mannose, galactose, fructose or sorbose as monosaccharides, sucrose, lactose, maltose or trehalose as disaccharides and raffinose as a trisaccharide. A sugar alcohol can be, for example, mannitose. In some embodiments, the composition comprises sucrose, lactose, maltose, trehalose, mannitol and/or sorbitol. In some embodiments, the composition comprises mannitol.

[0240] Furthermore, in some embodiments the presently disclosed compositions can include physiological well-tolerated excipients (see e.g., the Rowe et al., 2006), such as antioxidants like ascorbic acid or glutathione, preserving agents such as phenol, m-cresole, methyl- or propylparabene, chlorobutanol, thiomersal or benzalkoniumchloride, stabilizer, framework former such as sucrose, lactose, maltose, trehalose, mannitose, mannitol and/or sorbitol, mannitol and/or lactose and solubilizer such as polyethyleneglycols (PEG), i.e. PEG 3000, 3350, 4000, or 6000, or cyclodextrines, i.e. hydroxypropyle-β-cyclodextrine, sulfobutylethyl-β-cyclodextrine or γ-cyclodextrine, or dextranes or poloxaomers, i.e. poloxaomer 407, poloxamer 188, or TWEEN™20, TWEEN™80. In some embodiments, one or more well tolerated excipients can be included, selected from the group consisting of antioxidants, framework formers, and stabilizers.

[0241] In some embodiments, the pH for intravenous and intramuscular administration is selected from pH 2 to pH 12, while the pH for subcutaneous administration is selected from pH 2.7 to pH 9.0 as the rate of in vivo dilution is reduced resulting in more potential for irradiation at the injection site. (Strickley, 2004).

[0242] It is understood that a suitable dosage of a peptide composition vaccine immunogen will depend upon the age, sex, health, and weight of the recipient, the kind of concurrent treatment, if any, the frequency of treatment, and the nature of the effect desired. However, a desired dosage can be tailored to the individual subject, as determined by the researcher or clinician. The total dose employed for any given treatment can typically be determined with respect to a standard reference dose based on the experience of the researcher or clinician, such dose being administered either in a single treatment or in a series of doses, the success of which can depend on the production of a desired immunological result (i.e., successful production of a T helper cell and/or CTL-mediated response to the peptide immunogen composition, which response gives rise to the prevention and/or treatment desired). Thus, in some embodiments the overall administration schedule can be considered in determining the success of a course of treatment and not whether a single dose, given in isolation, would or would not produce the desired immunologically therapeutic result or effect. As such, a therapeutically effective amount (i.e., that producing the desired T helper cell and/or CTL-mediated response) can in some embodiments depend on the antigenic composition of the vaccine used, the nature of the disease condition, the severity of the disease condition, the extent of any need to prevent such a condition where it has not already been detected, the manner of administration dictated by the situation requiring such administration, the weight and state of health of the individual receiving such administration, and/or the sound judgment of the clinician or researcher. Needless to say, the efficacy of administering additional doses and of increasing or decreasing the interval can be re-evaluated on a continuing basis, in view of the recipient's immunocompetence (for example, the level of T helper cell and/or CTL activity with respect to tumor-associated or tumor-specific antigens).

[0243] The concentration of the T helper or CTL stimulatory peptides of the presently disclosed subject matter in pharmaceutical formulations are subject to wide variation, including anywhere from less than 0.01% by weight to as much as 50% or more. Factors such as volume and viscosity of the resulting composition can also be considered. The solvents, or diluents, used for such compositions can include one or more of water, phosphate buffered saline (PBS), saline itself, and/or other possible carriers and/or excipients. The immunogens of the presently disclosed subject matter can in some embodiments also be contained in artificially created structures such as liposomes, which structures can in some embodiments contain additional molecules, such as proteins or polysaccharides, inserted in the outer membranes of the structures and having the effect of targeting the liposomes to particular areas of the body, or to particular cells within a given organ or tissue. Such targeting molecules can in some embodiments be some type of immunoglobulin. Antibodies can work particularly well for targeting the liposomes to tumor cells.

[0244] Single i.d., i.m., s.c., i.p., and/or i.v. doses of e.g., about 1 to 50 μg to 100 μg to 500 μg, 1 to 1000 μg or about 1 to 50 mg, 1 to 100 mg, 1 to 500 mg, or 1 to 1000 mg of a peptide composition of the presently disclosed subject matter can in some embodiments be given and in some embodiments can depend from the respective compositions of peptides with respect to total amount for all peptides in the composition or alternatively for each individual peptide in the composition. A single dose of a peptide vaccine composition of the presently disclosed subject matter can in some embodiments have a peptide amount (e.g., total amount for all peptides in the composition or alternatively for each individual peptide in the composition) of about or at least 1, 5, 10, 15, 20, 25, 30, 35, 40, 45, 50, 55, 60, 65, 70, 75, 80, 85, 90, 95, 100, 125, 150, 175, 200, 225, 250, 275, 300, 325, 350, 375, 400, 425, 450, 475, 500, 525, 550, 575, 600, 625, 650, 675, 700, 725, 750, 775, 800, 825, 850, 875, 900, or 950 Alternatively, a single dose of a peptide composition of the presently disclosed subject matter can in some embodiments have a total peptide amount (e.g., total amount for all peptides in the composition or alternatively for each individual peptide in the composition) of about or at least 1, 5, 10, 15, 20, 25, 30, 35, 40, 45, 50, 55, 60, 65, 70, 75, 80, 85, 90, 95, 100, 125, 150, 175, 200, 225, 250, 275, 300, 325, 350, 375, 400, 425, 450, 475, 500, 525, 550, 575, 600, 625, 650, 675, 700, 725, 750, 775, 800, 825, 850, 875, 900, or 950 mg. In some embodiments, the peptides of a composition of the presently disclosed subject matter are present in equal amounts of about 100 micrograms per dose in combination with an adjuvant peptide present in an amount of about 200 micrograms per dose.

[0245] In a single dose of the peptide composition of the presently disclosed subject matter, the amount of each peptide in the composition is in some embodiments equal or is in some embodiments substantially equal. Alternatively, the ratio of the peptides present in the least amount relative to the peptide present in the greatest amount is in some embodiments about or at least 1:1.25, 1:1.5, 1:1.75, 1:2.0, 1:2.25, 1:2.5, 1:2.75, 1:3, 1:4, 1:5, 1:6, 1:7, 1:8, 1:9, 1:10, 1:20, 1:30; 1:40, 1:50, 1:100, 1:200, 1:500, 1:1000, 1:5000;

[0246] 1:10,000; or 1:100,000. Alternatively, the ratio of the peptides present in the least amount relative to the peptide present in the greatest amount is in some embodiments about or at least 1 or 2 to 25; 1 or 2 to 20; 1 or 2 to 15; 1 or 2 to 10; 1 to 3; 1 to 4; 1 to 5; 1 to 6; 1 to 7; 1 to 10; 2 to 3; 2 to 4; 2 to 5; 2 to 6; 2 to 7; 2 to 10; 3 to 4; 3 to 5; 3 to 6; 3 to 7; 3 to 10; 5 to 10; 10 to 15; 15 to 20; 20 to 25; 1 to 40; 1 to 30; 1 to 20; 1 to 15; 10 to 40; 10 to 30; 10 to 20; 10 to 15; 20 to 40; 20 to 30; or 20 to 25; 1 to 100; 25 to 100; 50 to 100; 75 to 100; 25 to 75, 25 to 50, or 50 to 75; 25 to 40; 25 to 50; 30 to 50; 30 to 40; or 30 to 75.

[0247] Single dosages can in some embodiments be given to a patient about or at least 1, 2, 3, 4, or 5 times per day. Single dosages can in some embodiments be given to a patient about or at least 1, 2, 3, 4, 5, 6, 7, 8, 9, 10, 11, 12, 13, 14, 15, 16, 18, 19, 20, 21, 22, 23, 24, 36, 48, 60, or 72 hours subsequent to a previous dose.

[0248] Single dosages can in some embodiments be given to a patient about or at least 1, 2, 3, 4, 5, 6, or 7 times per week or every other, third, fourth, or fifth day. Single doses can in some embodiments also be given every week, every other week, or only during 1, 2, or 3 weeks per month. A course of treatment can in some embodiments last about or at least 1, 2, 3, 4, 5, 6, 7, 8, 9, 10, 11, or 12 months.

[0249] In some embodiments, single dosages of the compositions of the presently disclosed subject matter are provided to a patient in at least two phases, e.g., during an initial phase and then a subsequent phase. An initial phase can in some embodiments be about or at least 1, 2, 3, 4, 5, or 6 weeks in length. The subsequent phase can in some embodiments last at least or about 1, 2, 3, 4, 5, 6, 7, or 8 times as long as the initial phase. The initial phase can in some embodiments be separated from the subsequent phase by about or at least 1, 2, 3, 4, 5, 6, 7, 8, 9, 10, 11, or 12 weeks or months.

[0250] The peptide composition dosage during the subsequent phase can in some embodiments be at least 1, 2, 3, 4, 5, 6, 7, 8, 9, 10, 15, 20, 30, 40, 50, 60, 70, 80, 90, 100, 200, 300, 400, 500, 600, 700, 800, 900, or 1000 times greater than during the initial phase. The peptide composition dosage during the subsequent phase can in some embodiments be at least 1, 2, 3, 4, 5, 6, 7, 8, 9, 10, 15, 20, 30, 40, 50, 60, 70, 80, 90, 100, 200, 300, 400, 500, 600, 700, 800, 900, or 1000 times lower than during the initial phase.

[0251] In some embodiments, the initial phase is about three weeks and the second phase is about 9 weeks. In some embodiments, the peptide compositions would be administered to the patient on or about days 1, 8, 15, 36, 57, and 78.

[0252] In some embodiments, the presently disclosed subject matter provides a kit. In some embodiments the kit comprises (a) a container that contains at least one peptide composition as described herein in solution or in lyophilized form; (b) optionally, a second container containing a diluent or reconstituting solution for the lyophilized formulation; and (c) also optionally, instructions for (i) use of the solution; and/or (ii) reconstitution and/or use of the lyophilized formulation. The kit can in some embodiments further comprise one or more of (iii) a buffer, (iv) a diluent, (v) a filter, (vi) a needle, and/or (v) a syringe. In some embodiments, the container is selected from the group consisting of a bottle, a vial, a syringe, a test tube, and a multi-use container. In some embodiments, the peptide composition is lyophilized.

[0253] The kits can in some embodiments contain exactly, about, or at least 1, 2, 3, 4, 5, 6, 7, 8, 9, 10, 11, 12, 13, 14, 15, 16, 17, 18, 19, 20, 21, 22, 23, 24, 25, 26, 27, 28, 29, 30, 31, 32, 33, 34, 35, 36, 37, 38, 39, 40, 41, 42, 43, 45, 46, 47, 48, 49, 50, 51, or more peptide-containing compositions. Each composition in the kit can in some embodiments be administered at the same time or at different times to a subject.

[0254] In some embodiments, the kits can comprise a lyophilized formulation of the presently disclosed compositions and/or vaccines in a suitable container and instructions for its reconstitution and/or use. Suitable containers include, for example, bottles, vials (e.g. dual chamber vials), syringes (such as dual chamber syringes), and test tubes. The container can in some embodiments be formed from a variety of materials such as glass or plastic. In some embodiments, the kit and/or container include instructions on or associated with the container that indicate directions for reconstitution and/or use. For example, the label can in some embodiments indicate that the lyophilized formulation is to be reconstituted to peptide concentrations as described above. The label can in some embodiments further indicate that the formulation is useful or intended for subcutaneous administration. Lyophilized and liquid formulations are in some embodiments stored at −20° C. to −80° C.

[0255] The container holding the peptide composition(s) can in some embodiments be a multi-use vial, which allows for repeat administrations (e.g., from 2-6 administrations) of the reconstituted formulation. The kit can in some embodiments further comprise a second container comprising a suitable diluent such as, but not limited to a sodium bicarbonate solution.

[0256] In some embodiments, upon mixing of the diluent and the lyophilized formulation, the final peptide concentration in the reconstituted formulation is at least or about 0.15, 0.20, 0.25, 0.5, 0.75, 1.0, 1.25, 1.5, 1.75, 2.0, 2.25, 2.5, 2.75, 3.0, 3.25, 3.50, 3.75, 4.0, 4.25, 4.5, 4.75, 5.0, 6.0, 7.0, 8.0, 9.0, or 10 mg/mL/peptide. In some embodiments, upon mixing of the diluent and the lyophilized formulation, the final peptide concentration in the reconstituted formulation is at least or about 0.15, 0.20, 0.25, 0.5, 0.75, 1.0, 1.25, 1.5, 1.75, 2.0, 2.25, 2.5, 2.75, 3.0, 3.25, 3.50, 3.75, 4.0, 4.25, 4.5, 4.75, 5.0, 6.0, 7.0, 8.0, 9.0 or 10 μg/mL/peptide.

[0257] The kit can in some embodiments further comprise other materials desirable from a commercial and user standpoint, including but not limited to other buffers, diluents, filters, needles, syringes, and/or package inserts with instructions for use.

[0258] The kits can in some embodiments have a single container that comprises the formulation of the peptide compositions with or without other components (e.g., other compounds or compositions of these other compounds) or can in some embodiments have a distinct container for each component.

[0259] Additionally, the kits can in some embodiments comprise a formulation of the presently disclosed peptide compositions and/or vaccines packaged for use in combination with the co-administration of a second compound such as but not limited to adjuvants (e.g. imiquimod), a chemotherapeutic agent, a natural product, a hormone or antagonist, an anti-angiogenesis agent or inhibitor, an apoptosis-inducing agent, or a chelator or a composition thereof. The components of the kit can in some embodiments be pre-complexed or each component can in some embodiments be in a separate distinct container prior to administration to a patient. The components of the kit can in some embodiments be provided in one or more liquid solutions. In some embodiments, the liquid solution is an aqueous solution. In some embodiments, the liquid solution is a sterile aqueous solution. The components of the kit can in some embodiments also be provided as solids, which in some embodiments are converted into liquids by addition of suitable solvents, which can in some embodiments be provided in another distinct container.

[0260] The container of a therapeutic kit can in some embodiments be a vial, a test tube, a flask, a bottle, a syringe, or any other article suitable to enclose a solid or liquid. In some embodiments, when there is more than one component, the kit can contain a second vial and/or other container, which allows for separate dosing. The kit can in some embodiments also contain another container for a pharmaceutically acceptable liquid. In some embodiments, a therapeutic kit contains an apparatus (e.g., one or more needles, syringes, eye droppers, pipette, etc.) that facilitates administration of the agents of the disclosure that are components of the present kit.

[0261] When administered to a patient, the vaccine compositions of the presently disclosed subject matter are envisioned to have certain physiological effects, including but not limited to the induction of a T cell mediated immune response. In some embodiments, the vaccine compositions of the presently disclosed subject matter induce and anti-tumor immune response and/or an anti-cancer immune response. In some embodiments, the vaccine compositions of the presently disclosed subject matter are envisioned to have an anti-microbial immune response, which in some embodiments can be an anti-bacterial immune response, an anti-viral immune response, or a combination thereof.

[0262] Immunohistochemistry, Immunofluorescence, Western Blots, and Flow Cytometry

[0263] Validation and testing of antibodies for characterization of cellular and molecular features of lymphoid neogenesis has been performed. Commercially available antibodies for use in immunohistochemistry (IHC), immunofluorescence (IF), flow cytometry (FC), and western blot (WB) can in some embodiments be employed. In some embodiments, such techniques can be employed to analyze patient samples, e.g., formalin-fixed, paraffin-embedded tissue samples, for CD1a, S100, CD83, DC-LAMP, CD3, CD4, CD8, CD20, CD45, CD79a, PNAd, TNFalpha, LIGHT, CCL19, CCL21, CXCL12, TLR4, TLR7, FoxP3, PD1 and Ki67 expression. In some embodiments, flow cytometry is used to determine CD3, CD4, CD8, CD13, CD14, CD16, CD19, CD45RA, CD45RO, CD56, CD62L, CD27, CD28, CCR7, FoxP3 (intracellular), and MHC-peptide tetramers for I MHC associated (phospho)-peptides. In some embodiments, positive control tissue selected from among normal human peripheral blood lymphocytes (PBL), PBL activated with CD3/CD28 beads (activated PBL), human lymph node tissue from non-HCC patients (LN), and inflamed human tissue from a surgical specimen of Crohn's disease (Crohn's) can be employed.

[0264] ELISpot Assay

[0265] In some embodiments, vaccination site infiltrating lymphocytes and lymphocytes from the sentinel immunized nod (SIN) and vaccine site can be evaluated by ELISpot. ELISpot permits the direct counting of T-cells reacting to antigen by production of INFγ. Peripheral blood lymphocytes can be evaluated by ELISpot assay for the number of peptide-reactive T-cells. Vaccine site infiltrating lymphocytes and SIN lymphocytes can be compared to those in peripheral blood. It is envisioned that positive results of the ELISpot assay correlate with increased patient progression free survival. Progression free survival is in some embodiments defined as the time from start of treatment until death from any cause or date of last follow up.

[0266] Tetramer Assay

[0267] Peripheral blood lymphocytes and lymphocytes from the SIN and vaccine site can be evaluated by flow cytometry after incubation with MHC-peptide tetramers for the number of peptide-reactive T-cells.

[0268] Proliferation Assay/Cytokine Analysis

[0269] Peripheral blood mononuclear cells (PBMC), vaccine-site inflammatory cells, and lymphocytes from the SIN from patients can in some embodiments be evaluated for CD4 T cell reactivity to, e.g., tetanus helper peptide mixture, using a ³H-thymidine uptake assay. Additionally, Th1 (IL-2, IFN-gamma, TNFa), Th2 (IL-4, IL-5, IL-10), Th17 (IL-17, and IL23), and T-reg (TGF-beta) cytokines in media from 48 hours in that proliferation assay can be employed to determine if the microenvironment supports generation of Th1, Th2, Th17, and/or T-reg responses. In some embodiments, two peptides are used as negative controls: a tetanus peptide and the Pan DR T helper epitopes (PADRE) peptide (AK(X)VAAWTLKAA; SEQ ID NO: 3974).

[0270] Evaluation of Tumors

[0271] In some embodiments tumor tissue collected prior to treatment or at the time of progression can be evaluated by routine histology and immunohistochemistry. Alternatively or in addition, in vitro evaluations of tumor tissue and tumor infiltrating lymphocytes can be completed.

[0272] Studies of Homing Receptor Expression

[0273] Patient samples can in some embodiments be studied for T cell homing receptors induced by vaccination the compositions of the presently disclosed subject matter. These include, but are not limited to, integrins (including alphaE-beta7, alpha1-beta1, alpha4-beta1), chemokine receptors (including CXCR3), and selectin ligands (including CLA, PSL) on lymphocytes, and their ligands in the vaccine sites and SIN. These can be assayed by immunohistochemistry, flow cytometry or other techniques.

[0274] Studies of Gene and Protein Expression

[0275] Differences in gene expression and/or for differences in panels of proteins can in some embodiments be assayed by high-throughput screening assays (e.g. nucleic acid chips, protein arrays, etc.) in the vaccine sites and sentinel immunized nodes.

### VII. Antibodies Including Antibody-Like Molecules

[0276] In some embodiments, the present disclosure provides antibodies and antibody-like molecules (e.g. T cell receptors) that specifically bind to the peptides (e.g., phosphopeptides) disclosed herein, or to complexes of an MHC molecule (e.g., a class I MHC fmolecule) and the peptides disclosed herein. In some embodiments, the antibodies and antibody-like molecules (e.g. T cell receptors) specifically bind to complexes of phosphopeptides and corresponding MHC alleles as set forth in Tables 3-7.

[0277] Antibodies and antibody-like molecules (e.g. T cell receptors) specific for peptides or peptide/MHC complexes are, for example, useful, inter alia, for analyzing tissue to determine the pathological nature of tumor margins and/or can be employed in some embodiments as therapeutics. Alternatively, such molecules can in some embodiments be employed as therapeutics targeting cells, e.g., tumor cells, which display peptides on their surface. In some embodiments, the antibodies and antibody-like molecules bind the peptides or peptide-MHC complex specifically and do not substantially cross react with non-phosphorylated native peptides.

[0278] As used herein, “antibody” and “antibody peptide(s)” refer to intact antibodies, antibody-like molecules, and binding fragments thereof that compete with intact antibodies for specific binding. Binding fragments are in some embodiments produced by recombinant DNA techniques or in some embodiments by enzymatic or chemical cleavage of intact antibodies. Binding fragments include Fab, Fab′, F(ab′)₂, Fv, and single-chain antibodies. An antibody other than a “bispecific” or “bifunctional” antibody is understood to have each of its binding sites identical. An antibody in some embodiments substantially inhibits adhesion of a receptor to a counterreceptor when an excess of antibody reduces the quantity of receptor bound to counterreceptor by at least about 20%, 40%, 60%, 80%, 85%, 90%, 91%, 92%, 93%, 94%, 95%, 96%, 97%, 98%, 99%, or greater than 99% as measured, for example, in an in vitro competitive binding assay.

[0279] The term “MHC” as used herein refers to the Major Histocompability Complex, which is defined as a set of gene loci specifying major histocompatibility antigens. The term “HLA” as used herein refers to Human Leukocyte Antigens, which are defined as the histocompatibility antigens found in humans. As used herein, “HLA” is the human form of “MHC”.

[0280] The terms “MHC light chain” and “MHC heavy chain” as used herein refer to portions of MHC molecules. Structurally, class I molecules are heterodimers comprised of two non-covalently bound polypeptide chains, a larger “heavy” chain (α) and a smaller “light” chain (β-2-microglobulin or β2m). The polymorphic, polygenic heavy chain (45 kDa), encoded within the MHC on chromosome six, is subdivided into three extracellular domains (designated 1, 2, and 3), one intracellular domain, and one transmembrane domain. The two outermost extracellular domains, 1 and 2, together form the groove that binds antigenic peptide. Thus, interaction with the TCR occurs at this region of the protein. The 3 domain of the molecule contains the recognition site for the CD8 protein on the CTL; this interaction serves to stabilize the contact between the T cell and the APC.

[0281] The invariant light chain (12 kDa), encoded outside the MEW on chromosome 15, consists of a single, extracellular polypeptide. The terms “MHC light chain”, “β-2-microglobulin”, and “β2m” are used interchangeably herein.

[0282] The term “epitope” includes any protein determinant capable of specific binding to an immunoglobulin or T-cell receptor. Epitopic determinants usually consist of chemically active surface groupings of molecules such as amino acids or sugar side chains and usually have specific three dimensional structural characteristics, as well as specific charge characteristics. An antibody or antibody like molecule is said to “specifically” bind an antigen when the dissociation constant is in some embodiments less than 1 μM, in some embodiments less than 100 nM, and in some embodiments less than 10 nM.

[0283] The term “antibody” is used in the broadest sense, and specifically covers monoclonal antibodies (including full length monoclonal antibodies), polyclonal antibodies, multispecific antibodies (e.g., bi specific antibodies), and antibody fragments (e.g., Fab, F(ab′)2 and Fv), as well as “antibody-like molecules” so long as they exhibit the desired biological activity. Antibodies (Abs) and immunoglobulins (Igs) are glycoproteins having the same structural characteristics. The term is also meant to encompass “antibody like molecules” and other members of the immunoglobulin superfamily, e.g., T-cell receptors, MEW molecules, containing e.g., an antigen-binding regions and/or variable regions, e.g., complementary determining regions (CDRs) which specifically bind the peptides disclosed herein.

[0284] In some embodiments, antibodies and antibody-like molecules bind to the peptides of the presently disclosed subject matter but do not substantially and/or specifically cross react with the same peptide in a modified form. See e.g., U.S. Patent Application Publication No. 2009/0226474, which is incorporated by reference.

[0285] The presently disclosed subject matter also includes antibodies that recognize peptides associated with a tumorigenic or disease state, wherein the peptides are displayed in the context of HLA molecules. These antibodies typically mimic the specificity of a T cell receptor (TCR) but can in some embodiments have higher binding affinity such that the molecules can be employed as therapeutic, diagnostic, and/or research reagents. Methods of producing a T-cell receptor mimic of the presently disclosed subject matter include identifying a peptide of interest (e.g., a phosphopeptide), wherein the peptide of interest comprises an amino acid sequence as set forth in any of SEQ ID NOs: 1-3921 and 3975-4000 (e.g., a phosphopeptide as set forth in Tables 3-7 herein). Then, an immunogen comprising at least one peptide/MHC complex is formed. An effective amount of the immunogen is then administered to a host for eliciting an immune response, and serum collected from the host is assayed to determine if desired antibodies that recognize a three-dimensional presentation of the peptide in the binding groove of the MHC molecule are being produced. The desired antibodies can differentiate the peptide/MHC complex from the MHC molecule alone, the peptide alone, and a complex of MHC and irrelevant peptide. Finally, in some embodiments the desired antibodies are isolated.

[0286] The term “antibody” also encompasses soluble T cell receptors (TCR) which are stable at low concentrations and which can recognize MHC-peptide complexes. See e.g., U.S. Patent Application Publication No. 2002/0119149, which is incorporated by reference. Such soluble TCRs might for example be conjugated to immunostimulatory peptides and/or proteins or moieties, such as CD3 agonists (anti-CD3 antibody), for example. The CD3 antigen is present on mature human T cells, thymocytes, and a subset of natural killer cells. It is associated with the TCR and is responsible for the signal transduction of the TCR.

[0287] Antibodies specific for the human CD3 antigen are well-known. One such antibody is the murine monoclonal antibody OKT3 which was the first monoclonal antibody approved by the FDA. OKT3 is reported to be a potent T cell mitogen (see e.g., Van Wauve, 1980; U.S. Pat. No. 4,361,539) and a potent T cell killer (Wong, 1990. Other antibodies specific for the CD3 antigen have also been reported (see e.g., PCT International Patent Application Publication No. WO 2004/0106380; U.S. Patent Application Publication No. 2004/0202657; U.S. Pat. Nos. 6,750,325; 6,706,265; GB 2249310A; Clark et al., 1989; U.S. Pat. No. 5,968,509; and U.S. Patent Application Publication No. 2009/0117102). ImmTACs (Immunocore Limited, Milton Park, Abington, Oxon, United Kingdom) are innovative bifunctional proteins that combine high-affinity monoclonal T cell receptor (mTCR) targeting technology with a clinically-validated, highly potent therapeutic mechanism of action (Anti-CD3 scFv).

[0288] Native antibodies and immunoglobulins are usually heterotetrameric glycoproteins of about 150,000 daltons, composed of two identical light (L) chains and two identical heavy (H) chains. Each light chain is linked to a heavy chain by one covalent disulfide bond. The number of disulfide linkages varies between the heavy chains of different immunoglobulin isotypes. Each heavy and light chain also has regularly spaced intrachain disulfide bridges. Each heavy chain has at one end a variable domain (VH) followed by a number of constant domains. Each light chain has a variable domain at one end (VL) and a constant domain at its other end. The constant domain of the light chain is aligned with the first constant domain of the heavy chain, and the light chain variable domain is aligned with the variable domain of the heavy chain. Particular amino acid residues are believed to form an interface between the light and heavy chain variable domains (Chothia et al., 1985; Novotny & Haber, 1985).

[0289] An “isolated” antibody is one which has been separated, identified, and/or recovered from a component of the environment in which it was produced. Contaminant components of its production environment are materials which would interfere with diagnostic or therapeutic uses for the antibody, and can include enzymes, hormones, and other proteinaceous or nonproteinaceous solutes. In some embodiments, the antibody is purified as measurable by at least one of the following three different methods: 1) to in some embodiments greater than 50% by weight of antibody as determined by the Lowry method, such as but not limited to in some embodiments greater than 75% by weight, in some embodiments greater than 85% by weight, in some embodiments greater than 95% by weight, in some embodiments greater than 99% by weight; 2) to a degree sufficient to obtain at least 10 residues of N-terminal or internal amino acid sequence by use of a spinning cup sequentator, such as at least 15 residues of sequence; or 3) to homogeneity by SDS-PAGE under reducing or non-reducing conditions using Coomasie blue or, in some embodiments, silver stain. Isolated antibodies include the antibody in situ within recombinant cells since at least one component of the antibody's natural environment is not present. In some embodiments, however, isolated antibodies are prepared by a method that includes at least one purification step.

[0290] The terms “antibody mutant”, “antibody variant”, and “antibody derivative” refer to an amino acid sequence variant of an antibody wherein one or more of the amino acid residues of a reference antibody has been modified (e.g., substituted, deleted, chemically modified, etc.). Such mutants necessarily have less than 100% sequence identity or similarity with the amino acid sequence of either the heavy or light chain variable domain of the reference antibody. The resultant sequence identity or similarity between the modified antibody and the reference antibody is thus in some embodiments at least 80%, in some embodiments at least 85%, in some embodiments at least 90%, in some embodiments at least 95%, in some embodiments at least 97%, and in some embodiments at least 99%.

[0291] The term “variable” in the context of variable domain of antibodies, refers to the fact that certain portions of the variable domains differ extensively in sequence among antibodies and are used in the binding and specificity of each particular antibody for its particular antigen(s). However, the variability is not evenly distributed through the variable domains of antibodies. It is concentrated in three segments called complementarity determining regions (CDRs) also known as hypervariable regions both in the light chain and the heavy chain variable domains. There are at least two techniques for determining CDRs: (1) an approach based on cross-species sequence variability (Kabat et al., 1987); and (2) an approach based on crystallographic studies of antigen-antibody complexes (Chothia et al., 1989). The more highly conserved portions of variable domains are called the framework (FR) regions. The variable domains of native heavy and light chains each comprise four FR regions, largely adopting a β-sheet configuration, connected by three CDRs, which form loops connecting, and in some cases forming part of, the beta-sheet structure. The CDRs in each chain are held together in close proximity by the FR regions and, with the CDRs from the other chain, contribute to the formation of the antigen binding site of antibodies (see Kabat et al., 1987). The constant domains are not involved directly in binding an antibody to an antigen, but exhibit various effector function, such as participation of the antibody in antibody-dependent cellular toxicity.

[0292] The term “antibody fragment” refers to a portion of a full-length antibody, generally the antigen binding or variable region. Examples of antibody fragments include Fab, Fab′, F(ab′)₂ and Fv fragments. Papain digestion of antibodies produces two identical antigen binding fragments, called the Fab fragment, each with a single antigen binding site, and a residual “Fc” fragment, so-called for its ability to crystallize readily. Pepsin treatment yields an F(ab′)₂ fragment that has two antigen binding fragments which are capable of cross-linking antigen, and a residual other fragment (which is termed pFc′). As used herein, “functional fragment” with respect to antibodies, refers to Fv, F(ab) and F(ab′)₂ fragments.

[0293] An “Fv” fragment is the minimum antibody fragment which contains a complete antigen recognition and binding site. This region consists of a dimer of one heavy and one light chain variable domain in a tight, non-covalent association (V_{H}-V_{L} dimer). It is in this configuration that the three CDRs of each variable domain interact to define an antigen binding site on the surface of the V_{H}-V_{L} dimer. Collectively, the six CDRs confer antigen binding specificity to the antibody. However, even a single variable domain (or half of an Fv comprising only three CDRs specific for an antigen) has the ability to recognize and bind antigen, although at a lower affinity than the entire binding site.

[0294] The Fab fragment, also designated as F(ab), also contains the constant domain of the light chain and the first constant domain (CH1) of the heavy chain. Fab′ fragments differ from Fab fragments by the addition of a few residues at the carboxyl terminus of the heavy chain CH1 domain including one or more cysteines from the antibody hinge region. Fab′-SH is the designation herein for Fab′ in which the cysteine residue(s) of the constant domains have a free thiol group. F(ab′) fragments are produced by cleavage of the disulfide bond at the hinge cysteines of the F(ab′)₂ pepsin digestion product. Additional chemical couplings of antibody fragments are known to those of ordinary skill in the art.

[0295] The light chains of antibodies (immunoglobulin) from any vertebrate species can be assigned to one of two clearly distinct types, called kappa and lambda, based on the amino sequences of their constant domain.

[0296] Depending on the amino acid sequences of the constant domain of their heavy chains, immunoglobulins can be assigned to different classes. There are at least five (5) major classes of immunoglobulins: IgA, IgD, IgE, IgG and IgM, and several of these can be further divided into subclasses (isotypes), e.g., IgG₁, IgG₂, IgG₃, and IgG₄; IgA₁ and IgA₂. The heavy chains constant domains that correspond to the different classes of immunoglobulins are called alpha (α), delta (Δ), epsilon (ε), gamma (γ), and mu (μ), respectively. The subunit structures and three-dimensional configurations of different classes of immunoglobulins are well-known.

[0297] The term “monoclonal antibody” as used herein refers to an antibody obtained from a population of substantially homogeneous antibodies, i.e., the individual antibodies comprising the population are identical except for possible naturally occurring mutations that can be present in minor amounts. Monoclonal antibodies are highly specific, being directed against a single antigenic site. Furthermore, in contrast to conventional (polyclonal) antibody preparations, which typically include different antibodies directed against different determinants (epitopes), each monoclonal antibody is directed against a single determinant on the antigen. In addition to their specificity, monoclonal antibodies can be advantageous in that they can be synthesized in hybridoma culture, uncontaminated by other immunoglobulins.

[0298] The modifier “monoclonal” indicates the character of the antibody as being obtained from a substantially homogeneous population of antibodies, and is not to be construed as requiring production of the antibody by any particular method. For example, the monoclonal antibodies to be used in accordance with the presently disclosed subject matter can in some embodiments be made by the hybridoma method first described by Kohler & Milstein, 1975, or can in some embodiments be made by recombinant methods, e.g., as described in U.S. Pat. No. 4,816,567. The monoclonal antibodies for use with the presently disclosed subject matter can in some embodiments also be isolated from phage antibody libraries using the techniques described in Clackson et al., 1991 or in Marks et al., 1991.

[0299] Utilization of the monoclonal antibodies of the presently disclosed subject matter can in some embodiments require administration of such or similar monoclonal antibody to a subject, such as a human. However, when the monoclonal antibodies are produced in a non-human animal, such as a rodent, administration of such antibodies to a human patient will normally elicit an immune response, wherein the immune response is directed towards the antibodies themselves. Such reactions limit the duration and effectiveness of such a therapy. In order to overcome such problem, the monoclonal antibodies of the presently disclosed subject matter can be “humanized”: that is, the antibodies can be engineered such that antigenic portions thereof are removed and like portions of a human antibody are substituted therefor, while the antibodies' affinity for specific peptide/MHC complexes is retained. This engineering can in some embodiments only involve a few amino acids, or can in some embodiments include entire framework regions of the antibody, leaving only the complementarity determining regions of the antibody intact. Several methods for humanizing antibodies are known in the art and are disclosed, for example, in U.S. Pat. Nos. 4,816,567; 5,712,120; 5,861,155; 5,869,619; 6,054,927; and 6,180,370; the entire content of each of which is hereby expressly incorporated herein by reference in its entirety.

[0300] Humanized forms of antibodies are chimeric immunoglobulins, immunoglobulin chains, or fragments thereof (such as Fv, Fab, Fab′, F(ab′)₂ or other antigen-binding subsequences of antibodies) that are principally comprised of the sequence of a human immunoglobulin, and contain minimal sequence derived from a non-human immunoglobulin. In some embodiments, humanization can be performed following the method of Winter and co-workers (see e.g., Jones et al., 1986; Riechmann et al., 1988; Verhoeyen et al., 1988) by substituting rodent CDRs or CDR sequences for the corresponding sequences of a human antibody. See also U.S. Pat. No. 5,225,539. In some embodiments, Fᵥ framework residues of a human immunoglobulin are replaced by corresponding non-human residues.

[0301] Humanized antibodies can also comprise residues which are found neither in the recipient antibody nor in the imported CDR or framework sequences. In general, a humanized antibody comprises substantially all of at least one, and typically two, variable domains, in which all or substantially all of the CDR regions correspond to those of a non-human immunoglobulin and all or substantially all of the framework regions are those of a human immunoglobulin consensus sequence. The humanized antibody optimally can in some embodiments also comprise at least a portion of an immunoglobulin constant region (Fc), typically that of a human immunoglobulin. See e.g., Jones et al., 1986; Riechmann et al., 1988; Presta, 1992.

[0302] Many articles relating to the generation or use of humanized antibodies teach useful examples of protocols that can be utilized with the presently disclosed subject matter, such as but not limited to Shinkura et al., 1998; Yenari et al., 1998; Richards et al., 1999; Morales et al., 2000; Mihara et al., 2001; Sandborn et al., 2001; and Yenari et al., 2001, all of which are expressly incorporated in their entireties by reference. For example, a treatment protocol that can be utilized in such a method includes a single dose, generally administered intravenously, of 10-20 mg of humanized mAb per kg (Sandborn et al., 2001). In some embodiments, alternative dosing patterns can be appropriate, such as but not limited to the use of three infusions, administered once every two weeks, of 800 to 1600 mg or even higher amounts of humanized mAb (Richards et al., 1999.). However, it is to be understood that the presently disclosed subject matter is not limited to the treatment protocols described above, and other treatment protocols that are known to a person of ordinary skill in the art can be utilized in the methods of the presently disclosed subject matter.

[0303] The presently disclosed and claimed subject matter further includes in some embodiments fully human monoclonal antibodies against specific peptide/MHC complexes. Fully human antibodies essentially relate to antibody molecules in which the entire sequence of both the light chain and the heavy chain, including the CDRs, arise from human genes. Such antibodies are referred to herein as “human antibodies” or “fully human antibodies”. Human monoclonal antibodies can be prepared by the trioma technique; the human B-cell hybridoma technique (see Kozbor et al., 1983), and the EBV hybridoma technique to produce human monoclonal antibodies (see Cole et al., 1985). Human monoclonal antibodies can in some embodiments be utilized in the practice of the presently disclosed subject matter and can in some embodiments be produced by using human hybridomas (see Cote et al., 1983)) or by transforming human B-cells with Epstein Barr Virus in vitro (see Cole et al., 1985).

[0304] In addition, human antibodies can also be produced using additional techniques, including but not limited to phage display libraries (Hoogenboom et al., 1991; Marks et al., 1991). Similarly, human antibodies can be made by introducing human immunoglobulin loci into transgenic animals, e.g., mice in which the endogenous immunoglobulin genes have been partially or completely inactivated. Upon challenge, human antibody production is observed, which closely resembles that seen in humans in all respects, including gene rearrangement, assembly, and antibody repertoire. This approach is described, for example, in U.S. Pat. Nos. 5,545,807; 5,545,806; 5,569,825; 5,625,126; 5,633,425; and 5,661,016; and in Marks et al., 1992; Lonberg et al., 1994; Lonberg & Huszar, 1995; Fishwild et al., 1996; Neuberger, 1996.

[0305] Human antibodies can in some embodiments additionally be produced using transgenic nonhuman animals which are modified so as to produce fully human antibodies rather than the animal's endogenous antibodies in response to challenge by an antigen. See PCT International Patent Application Publication No. WO 1994/02602). Typically, the endogenous genes encoding the heavy and light immunoglobulin chains in the non-human host are incapacitated, and active loci encoding human heavy and light chain immunoglobulins are inserted into the host's genome. The human genes are incorporated, for example, using yeast artificial chromosomes containing the requisite human DNA segments. An animal that provides all the desired modifications is then obtained as progeny by crossbreeding intermediate transgenic animals containing fewer than the full complement of the modifications.

[0306] A non-limiting example of such a nonhuman animal is a mouse, and is termed the XENOMOUSE™ as disclosed in PCT International Patent Application Publication Nos. WO 1996/33735 and WO 1996/34096. This animal produces B cells which secrete fully human immunoglobulins. The antibodies can be obtained directly from the animal after immunization with an immunogen of interest, as, for example, a preparation of a polyclonal antibody, or alternatively from immortalized B cells derived from the animal, such as hybridomas producing monoclonal antibodies. Additionally, the genes encoding the immunoglobulins with human variable regions can be recovered and expressed to obtain the antibodies directly, or can be further modified to obtain analogs of antibodies such as, for example, single chain Fv molecules.

[0307] An example of a method of producing a non-human host, exemplified as a mouse, lacking expression of an endogenous immunoglobulin heavy chain is disclosed in U.S. Pat. No. 5,939,598, incorporated herein by reference). It can be obtained by a method including deleting the J segment genes from at least one endogenous heavy chain locus in an embryonic stem cell to prevent rearrangement of the locus and to prevent formation of a transcript of a rearranged immunoglobulin heavy chain locus, the deletion being effected by a targeting vector containing a gene encoding a selectable marker; and producing from the embryonic stem cell a transgenic mouse whose somatic and germ cells contain the gene encoding the selectable marker.

[0308] An exemplary method for producing an antibody of interest, such as a human antibody, is disclosed in U.S. Pat. No. 5,916,771 incorporated herein by reference). It includes introducing an expression vector that contains a nucleotide sequence encoding a heavy chain into one mammalian host cell in culture, introducing an expression vector containing a nucleotide sequence encoding a light chain into another mammalian host cell, and fusing the two cells to form a hybrid cell. The hybrid cell expresses an antibody containing the heavy chain and the light chain.

[0309] The antigen peptides are known to be expressed on a variety of cancer cell types. Thus, antibodies and antibody-like molecules can be used where appropriate, in treating, diagnosing, vaccinating, preventing, retarding, and/or attenuating HCC, melanoma, ovarian cancer, breast cancer, colorectal cancer, squamous carcinoma of the lung, sarcoma, renal cell carcinoma, pancreatic carcinomas, squamous tumors of the head and neck, leukemia, brain cancer, liver cancer, prostate cancer, ovarian cancer, and cervical cancer.

[0310] The antigen peptides are known to be expressed on a variety of microbial infected cells.

[0311] Antibodies generated with specificity for the antigen peptides can be used to detect the corresponding peptides in biological samples. The biological sample could come from an individual who is suspected of having cancer and thus detection would serve to diagnose the cancer. Alternatively, the biological sample can in some embodiments come from an individual known to have cancer, and detection of the antigen peptides would serve as an indicator of disease prognosis, cancer characterization, or treatment efficacy. Appropriate immunoassays are well-known in the art and include, but are not limited to, immunohistochemistry, flow cytometry, radioimmunoassay, western blotting, and ELISA. Biological samples suitable for such testing include, but are not limited to, cells, tissue biopsy specimens, whole blood, plasma, serum, sputum, cerebrospinal fluid, pleural fluid, and urine. Antigens recognized by T cells, whether helper T lymphocytes or CTL, are not recognized as intact proteins, but rather as small peptides that associate with class I or class II MHC proteins on the surface of cells. During the course of a naturally occurring immune response antigens that are recognized in association with class II MHC molecules on antigen presenting cells are acquired from outside the cell, internalized, and processed into small peptides that associate with the class II MHC molecules. Conversely, the antigens that give rise to proteins that are recognized in association with class I MHC molecules are generally proteins made within the cells, and these antigens are processed and associate with class I MHC molecules. It is now well-known that the peptides that associate with a given class I or class II MHC molecule are characterized as having a common binding motif, and the binding motifs for a large number of different class I and II MHC molecules have been determined. It is also well-known that synthetic peptides can be made which correspond to the sequence of a given antigen and which contain the binding motif for a given class I or II MHC molecule. These peptides can then be added to appropriate antigen presenting cells, and the antigen presenting cells can be used to stimulate a T helper cell or CTL response either in vitro or in vivo. The binding motifs, methods for synthesizing the peptides, and methods for stimulating a T helper cell or CTL response are all well-known and readily available.

[0312] As used herein, the terms “T cell receptor” and “TCR” are used interchangeably and refer to full length heterodimeric αβ or γδ TCRs, antigen-binding fragments of TCRs, or molecules comprising TCR CDRs or variable regions. Examples of TCRs include, but are not limited to, full-length TCRs, antigen-binding fragments of TCRs, soluble TCRs lacking transmembrane and cytoplasmic regions, single-chain TCRs containing variable regions of TCRs attached by a flexible linker, TCR chains linked by an engineered disulfide bond, monospecific TCRs, multi-specific TCRs (including bispecific TCRs), TCR fusions, human TCRs, humanized TCRs, chimeric TCRs, recombinantly produced TCRs, and synthetic TCRs. The term encompasses wild-type TCRs and genetically engineered TCRs (e.g., a chimeric TCR comprising a chimeric TCR chain which includes a first portion from a TCR of a first species and a second portion from a TCR of a second species).

[0313] As used herein, the term “TCR variable region” is understood to encompass amino acids of a given TCR which are not included within the non-variable region as encoded by the TRAC gene for TCR α chains and either the TRBC1 or TRBC2 genes for TCR β chains. In some embodiments, a TCR variable region encompasses all amino acids of a given TCR which are encoded by a TRAV gene or a TRAJ gene for a TCR α chain or a TRBV gene, a TRBD gene, or a TRBJ gene for a TCR β chain (see e.g., LeFranc & LeFranc, 2001, which is incorporated by reference herein in its entirety).

[0314] As used herein, the term “constant region” with respect to a TCR refers to the extracellular portion of a TCR that is encoded by the TRAC gene for TCR α chains and either the TRBC1 or TRBC2 genes for TCR β chains. The term constant region does not include a TCR variable region encoded by a TRAV gene or a TRAJ gene for a TCR α chain or a TRBV gene, a TRBD gene, or a TRBJ gene for a TCR β chain (see e.g., LeFranc & LeFranc, 2001, which is incorporated by reference herein in its entirety).

[0315] Kits can in some embodiments be composed for help in diagnosis, monitoring, and/or prognosis. The kits are to facilitate the detecting and/or measuring of cancer-specific peptides or proteins. Such kits can in some embodiments contain in a single or divided container, a molecule comprising an antigen-binding region. Such molecules can in some embodiments be antibodies and/or antibody-like molecules. Additional components that can be included in the kit include, for example, solid supports, detection reagents, secondary antibodies, instructions for practicing, vessels for running assays, gels, control samples, and the like. The antibody and/or antibody-like molecules can in some embodiments be directly or indirectly labeled, as an option.

[0316] Alternatively or in addition, the antibody or antibody-like molecules specific for peptides and/or peptide/MHC complexes can in some embodiments be conjugated to therapeutic agents. Exemplary therapeutic agents include anti-cancer agents, anti-tumor agents, antimicrobial agents, antivirals, and therapeutic agents for use in treating neurological diseases including but not limited to Alzheimer's disease.

[0317] Alkylating Agents: Alkylating agents are drugs that directly interact with genomic DNA to prevent cells from proliferating. This category of chemotherapeutic drugs represents agents that affect all phases of the cell cycle, that is, they are not phase-specific. An alkylating agent can in some embodiments include, but is not limited to, a nitrogen mustard, an ethylenimene, a methylmelamine, an alkyl sulfonate, a nitrosourea or a triazines. They include but are not limited to busulfan, chlorambucil, cisplatin, cyclophosphamide (cytoxan), dacarbazine, ifosfamide, mechlorethamine (mustargen), and melphalan.

[0318] Antimetabolites: Antimetabolites disrupt DNA and RNA synthesis. Unlike alkylating agents, they specifically influence the cell cycle during S phase. Antimetabolites can be differentiated into various categories, such as folic acid analogs, pyrimidine analogs and purine analogs and related inhibitory compounds. Antimetabolites include but are not limited to 5-fluorouracil (5-FU), cytarabine (Ara-C), fludarabine, gemcitabine, and methotrexate.

[0319] Natural Products: Natural products generally refer to compounds originally isolated from a natural source, and identified as having a pharmacological activity. Such compounds, as well as analogs and derivatives thereof, can in some embodiments be isolated from a natural source, chemically synthesized or recombinantly produced by any technique known to those of skill in the art. Natural products include such categories as mitotic inhibitors, antitumor antibiotics, enzymes and biological response modifiers.

[0320] Mitotic inhibitors include plant alkaloids and other natural agents that can inhibit either protein synthesis required for cell division or mitosis. They operate during a specific phase during the cell cycle. Mitotic inhibitors include, for example, docetaxel, etoposide (VP16), teniposide, paclitaxel, taxol, vinblastine, vincristine, and vinorelbine.

[0321] Taxoids are a class of related compounds isolated from the bark of the ash tree, Taxus brevifolia. Taxoids include, but are not limited to, compounds such as docetaxel and paclitaxel. Paclitaxel binds to tubulin (at a site distinct from that used by the vinca alkaloids) and promotes the assembly of microtubules.

[0322] Vinca alkaloids are a type of plant alkaloid identified to have pharmaceutical activity. They include such compounds as vinblastine (VLB) and vincristine.

[0323] Antibiotics: Certain antibiotics have both antimicrobial and cytotoxic activity. These drugs can also interfere with DNA by chemically inhibiting enzymes and mitosis or altering cellular membranes. These agents are typically not phase-specific so they work in all phases of the cell cycle. Examples of cytotoxic antibiotics include but are not limited to bleomycin, dactinomycin, daunorubicin, doxorubicin (Adriamycin), plicamycin (mithramycin), and idarubicin.

[0324] Miscellaneous Agents: Miscellaneous cytotoxic agents that do not fall into the previous categories include but are not limited to platinum coordination complexes, anthracenediones, substituted ureas, methyl hydrazine derivatives, amsacrine, L-asparaginase, and tretinoin. Platinum coordination complexes include such compounds as carboplatin and cisplatin (cis-DDP). An exemplary anthracenedione is mitoxantrone. An exemplary substituted urea is hydroxyurea. An exemplary methyl hydrazine derivative is procarbazine (N-methylhydrazine, MIH). These examples are not limiting and it is contemplated that any known cytotoxic, cytostatic, and/or cytocidal agent can be conjugated or otherwise attached to targeting peptides and administered to a targeted organ, tissue, and/or cell type within the scope of the presently disclosed subject matter.

[0325] Chemotherapeutic (cytotoxic) agents include but are not limited to 5-fluorouracil, bleomycin, busulfan, camptothecin, carboplatin, chlorambucil, cisplatin (CDDP), cyclophosphamide, dactinomycin, daunorubicin, doxorubicin, estrogen receptor binding agents, etoposide (VP16), farnesyl-protein transferase inhibitors, gemcitabine, ifosfamide, mechlorethamine, melphalan, mitomycin, navelbine, nitrosurea, plicomycin, procarbazine, raioxifene, tamoxifen, taxol, temazolomide (an aqueous form of DTIC), transplatinum, vinblastine and methotrexate, vincristine, or any analog or derivative variant of the foregoing. Most chemotherapeutic agents fall into the categories of alkylating agents, antimetabolites, antitumor antibiotics, corticosteroid hormones, mitotic inhibitors, and nitrosoureas, hormone agents, miscellaneous agents, and any analog or derivative variant thereof.

[0326] The peptides identified and tested thus far in peptide-based vaccine approaches have generally fallen into one of three categories: 1) mutated on individual tumors, and thus not displayed on a broad cross section of tumors from different patients; 2) derived from unmutated tissue-specific proteins, and thus compromised by mechanisms of self-tolerance; and 3) expressed in subsets of cancer cells and normal testes.

[0327] Antigens linked to transformation or oncogenic processes are of primary interest for immunotherapeutic development based on the hypothesis that tumor escape through mutation of these proteins can be more difficult without compromising tumor growth or metastatic potential.

[0328] The peptides of the presently disclosed subject matter are unique in that the identified peptides are modified by intracellular modification. This modification is of particular relevance because it is associated with a variety of cellular control processes, some of which are dysregulated in cancer cells. For example, the source proteins for class I MHC-associated phosphopeptides are often known phosphoproteins, supporting the idea that the phosphopeptides are processed from folded proteins participating in signaling pathways.

[0329] Although not wishing to be bound by any particular theory, it is envisioned that the peptides of the presently disclosed subject matter are unexpectedly superior to known tumor-associated antigen-derived peptides for use in immunotherapy because: 1) they only displayed on the surface of cells in which intracellular phosphorylation is dysregulated, i.e., cancer cells, and not normal thymus cells, and thus they are not are not compromised by self-tolerance (as opposed to TAA which are associated with overexpression or otherwise expressed on non-mutated cells); and/or 2) they identify a cell displaying them on their surface as having dysregulated phosphorylation. Thus, post-translationally-modified phosphopeptides that are differentially displayed on cancer cells and derived from source proteins objectively linked to cellular transformation and metastasis allow for more extensive anti-tumor responses to be elicited following vaccination. Peptides are, therefore, better immunogens in peptide-based vaccines, as peptides are derived from proteins involved with cellular growth control, survival, or metastasis and alterations in these proteins as a mechanism of immune escape can interfere with the malignant phenotype of tumors.

[0330] As such, the presently disclosed subject matter also relates in some embodiments to methods for identifying peptides for use in immunotherapy which are displayed on transformed cells but are not substantially expressed on normal tissue in general or in the thymus in particular. In some embodiments, peptides bind the MHC class I molecule more tightly than their non-phosphorylated native counterparts. Moreover, such peptides can in some embodiments have additional binding strength by having amino acid substitutions at certain anchor positions. In some embodiments, such modified peptides can remain cross-reactive with TCRs specific for native peptide MHC complexes. Additionally, it is envisioned that the peptides associated with proteins involved in intracellular signaling cascades or cycle regulation are of particular interest for use in immunotherapy. In some cases, the TCR binding can specifically react with the phosphate groups on the peptide being displayed on an WIC class I molecule.

[0331] In some embodiments, the method of screening peptides for use in immunotherapy, e.g., in adaptive cell therapy or in a vaccine, involves determining whether the candidate peptides are capable of inducing a memory T cell response. The contemplated screening methods can include providing peptides, e.g., those disclosed herein or those to be identified in the future, to a healthy volunteer and determining the extent to which a peptide-specific T cell response is observed. In some embodiments, the extent to which the T cell response is a memory T cell response is also determined. In some embodiments, it is determined the extent to which a TCM response is elicited, e.g., relative to other T cell types. In some embodiments, those peptides which are capable of inducing a memory T cell response in health and/or diseased patients are selected for inclusion in the therapeutic compositions of the presently disclosed subject matter.

[0332] In some embodiments, the presently disclosed subject matter provides methods for inducing a peptide-specific memory T cell response (e.g., T_{CM}) response in a patient by providing the patient with a composition comprising the peptides disclosed herein. In some embodiments, the compositions are those disclosed herein and are provided in a dosing regimen disclosed herein.

[0333] In some embodiments, the presently disclosed subject matter relates to methods for determining a cancer disease prognosis. These methods involve providing a patient with peptide compositions and determining the extent to which the patient is able to mount a peptide specific T cell response. In some embodiments, the peptide composition contains peptides selected in the same substantially the same manner that one would select peptides for inclusion in a therapeutic composition. If a patient is able to mount a significant peptide-specific T cell response, then the patient is likely to have a better prognosis than a patient with the similar disease and therapeutic regimen that is not able to mount a peptide-specific T cell response. In some embodiments, the methods involve determining whether the peptide specific T cell response is a T_{CM} response. In some embodiments, the presence of a peptide-specific T cell response as a result of the presently disclosed diagnostic methods correlates with an at least or about 5, 10, 15, 20, 25, 30, 35, 40, 45, 50, 55, 60, 65, 70, 75, 80, 85, 90, 95, 100, 125, 150, 175, 200, 250, 300, 400, 500, or more percent increase in progression free survival over standard of care.

### EXAMPLES

[0334] The presently disclosed subject matter will be now be described more fully hereinafter with reference to the accompanying EXAMPLES, in which representative embodiments of the presently disclosed subject matter are shown. The presently disclosed subject matter can, however, be embodied in different forms and should not be construed as limited to the embodiments set forth herein. Rather, these embodiments are provided so that this disclosure will be thorough and complete, and will fully convey the scope of the presently disclosed subject matter to those skilled in the art.

### Example 1

[0335] To identify naturally processed tumor-associated phosphopeptides, affinity-isolated HLA-A*0201 (HLA-A2) and HLA-B*0702 (HLA-B7) peptide complexes were recovered from four (4) primary chronic lymphocytic leukemia (CLL) tumor samples, a primary acute lymphoblastic leukemia (ALL) sample, a primary acute myeloid leukemia (AML) sample, normal splenic T and B-cells, normal bone marrow cells (BM), and the EBV transformed, cultured B-lymphoblastoid cell line JY. Collectively, ten (10) HLA-A2-restricted and 85 HLA-B7-restricted phosphopeptides were identified from these samples. Of these, 8/10 A2 and 60/85 B7 phosphopeptides were not observed on the normal samples.

[0336] Next, a modified ELISpot was employed assay to assess the immune responses, exhibited by 10 HLA A2⁺ and 10 HLA B7⁺ typed healthy blood donors to synthetic versions of the 10 HLA A2 and 85 HLA B7 phosphopeptides detected on the leukemia tumors. Peripheral blood mononuclear cells (PBMCs; 1×10⁶ cells) isolated from fresh blood were suspended in AIM-V media (10% human serum) without the addition of stimulatory cytokines (IL-2) and then placed in ELISpotPRO plates containing 96 wells precoated with IFN-γ monoclonal antibody, mAb 1-D1K, (product code: 3420-2APW-2 from Mabtech). Activated CD8⁺ T cells secrete IFN-γ. Individual phosphopeptides (10 μg/ml) were added to each well and the plate was then placed at 37° C. in a CO₂ incubator for either 24 hours or 7 days. Many MHC peptides bind with low affinity to the MHC molecule on T-cells (or any other cells) and dissociate once they get to the cell surface. Empty MHC molecules on the cell surface are thus available for capture of peptides added exogenously. Once loaded, the resulting MHC complexes become targets for the corresponding peptide specific CD8+ cells in donor PBMCs.

[0337] Locations of individual activated CD8⁺ T cells appear as dark spots following a 15 minute reaction of alkaline phosphatase conjugate (Mabtech) with 5-bromo-4 chloro-3-indole phosphate and NBT and are counted by using an automated reader (AID-Diagnostika). Results from a subset of the 85 HLA B7 peptides are shown in Table 3 and are displayed as the number of spot-forming cells (SFC) per 10⁶ PBMCs. Note that T-cells from numerous healthy donors respond to phosphopeptides detected on AML but not on healthy B- or T-cells. Of the 79 HLA B7 peptides tested, 12, 19, and 30 stimulated an immune response in 6 or more, 4 or more, and 3 or more healthy donors, respectively.

[0338] It is important to note that the magnitude of the observed memory T-cell responses to the tumor phosphopeptides were comparable to that observed for memory T-cell responses to unmodified peptides derived from common virus proteins.

### Example 2

[0339] White blood cells (90% T-cells) were collected from a healthy blood donor (homozygous for HLA A*0201 and B*0702) and expanded in culture to 8×10⁸ cells. Half of this sample was treated for 4 hours with the PP2A/PP1 inhibitor, calyculin, and the other half was not. MHC peptides from both samples were isolated by the standard protocol (see e.g., Zarling et al., 2006), enriched for phosphopeptide neoantigens by IMAC, and analyzed by nano-flow HPLC interfaced to ETD mass spectrometry. The number of Class I MHC phosphopeptides detected and sequenced on the calyculin treated and untreated samples were 139 and 39, respectively. One hundred Class I MHC phosphopeptides were uniquely presented on the cell surface as a result of PP2A/PP1 phosphatase inhibition. Forty five of these peptides had previously been found on multiple cancers and on the EBV (Epstein Barr Virus) immortalized B-cell, lymphoblastoid cell line, JY. See Table 3.

TABLE 3
Phosphopeptides Expressed on PP2A-inhibited
Healthy White Blood Cells
HLA A*02

| SEQ | | No | With | Found on |
|---|---|---|---|---|
| ID | | Inhib- | Inhib- | Other |
| NO. | Sequence | itor | itor | Cancers |
| | AVVsPPALHNA | No | Yes | O, M, JY, H |
| | GLDsGFHSV | No | Yes | H |
| | ILDsGIYRI | No | Yes | O, M, JY |
| | KAFsPVRSV | No | Yes | O, C, E, |
| | | | | H, L |
| | KIFsGVFVKV | No | Yes | H, JY |
| | KIGsIIFQV | No | Yes | O, H |
| | KLFPDtPLAL | No | Yes | O, C, M, |
| | | | | JY, H, L |
| | KLIDRTEsL | No | Yes | C, H, C, JY |
| | LLDFGSLSNLQV | No | Yes | M |
| | KLMsPKADVKL | No | Yes | O, M, H, JY |
| | KVAsLLHQV | No | Yes | O, H, JY |
| | RITsLIVHV | No | Yes | O |
| | RLDsYVRSL | No | Yes | O, E, M, |
| | | | | JY, H |
| | RLIsQIVSSI | No | Yes | CML |
| | RLLsPQQPAL | No | Yes | H |
| | RMLsLRDQRL | No | Yes | O |
| | RQAsLSISV | No | Yes | O, H, JY |
| | RQDsTPGKVFL | No | Yes | O, C, M, |
| | | | | JY, H |
| | RQIsQDVKL | No | Yes | O, C, E, |
| | | | | M, JY, H |
| | SLSsLLVKL | No | Yes | O |
| | TLAsPSVFKST | No | Yes | M, O, JY |
| | VLYsPQMAL | No | Yes | O, H |
| | VMFRIPLASV | No | Yes | O, M, JY |

### Example 3

[0340] From an HBV induced tumor sample that expressed HLA B*07, 133 class I MHC phosphopeptides were identified. Fifty-five of these peptides had been previously on two or more of the following cancers, melanoma, colorectal cancer, ovarian cancer and multiple leukemias. Twenty-five of the peptides had been tested earlier and found to be recognized by central memory T-cells. All fifty-five of these class I MHC phosphopeptides were also found on the HBV infected tissue that surrounded the tumor.

[0341] Similar results were obtained from the analysis of HLA A*03 phosphopeptides expressed on two liver tumors, one caused by HBV and the other by HCV. Seventeen HLA A*03 phosphopeptides that were found previously on multiple other cancers were also detected on the two liver cancers but not on normal cells. These same 17 phosphopeptides were also expressed on the surgically removed tissues that surrounded the tumors but were infected with HCV and HBV, respectively. These findings provided strong evidence that many class I MEW phosphopeptides expressed on cancers should also be found on virus infected cells and can thus be used as targets for immunotherapy of both types of disease.

[0342] Additional HBV and HCV surgical tumor samples and their surrounding tissues are tested in order to characterize MEW phosphopeptides presented by all the major Class I, MEW alleles; A*01, A*02, A*03, B*07, B*27, B*44, C*04, C*05, C*06, and C*07.

TABLE 4
HLA-A*03

| | | On Adja- | On Adja- | | |
|---|---|---|---|---|---|
| | | cent | cent | | |
| | | Healthy | Healthy | | |
| | | Tissue | Tissue | On | Found |
| SEQ | | Infected | Infected | HCC | on |
| ID | | With | With | Tumor | Other |
| NO | Peptide | HCV | HBV | 1, 2 | Cancers |
| | GIMSPLAKK | Y | Y | Y | C, H |
| | KLPsPAPARK | Y | Y | Y | C, H |
| | KLRsPFLQK | N | Y | Y | M, L, H |
| | KMPTtPVKAK | N | Y | Y | M, C, H |
| | KTPTSPLKMK | Y | Y | Y | M, L, H |
| | RAKsPISLK | Y | Y | Y | C, M, |
| | | | | | L, H |
| | RSYsYPRQK | Y | Y | Y | M, H |
| | RTAsFAVRK | Y | Y | Y | M, H |
| | RTASPPPPPK | Y | Y | Y | M, L, H |
| | RVKtPTSQSYR | Y | Y | Y | M, H |
| | RVLsPLIIK | Y | Y | Y | C, M, H |
| | RVYSPYNHR | Y | Y | Y | C, L, |
| | | | | | M, H |
| | SVKsPVTVK | Y | Y | Y | C, M, H |
| | SVRRsVLMK | Y | Y | Y | C, M, H |
| | TLLAsPMLK | Y | Y | Y | |

TABLE 5
HLA-B*07

| | | | On | | On | |
|---|---|---|---|---|---|---|
| | | | Adjacent | | Adjacent | |
| | | On | Healthy | On | Healthy | |
| SEQ | | HCC | Tissue | HCC | Tissue | |
| ID | | Tumor | infected | Tumor | with | Found on Other |
| NO | Peptide | 1 | with HBV | 2 | Adenoma | Cancers |
| | APDsPRAFL | Y | Y | Y | N | C, H |
| | APRRYSSSL | Y | Y | Y | N | C, M, O, L, H |
| | FPRRHsVTL | Y | Y | Y | N | M, C, L, H |
| | GPRPGSPSAL | Y | Y | Y | N | O, M, H |
| | KPASPKFIVTL | Y | Y | Y | N | C, M, O, L, H |
| | KPRPPPLSP | Y | Y | Y | N | C, M, H |
| | RPDVAKRLsL | Y | Y | Y | N | C, H, |
| | RPFSPREAL | Y | Y | Y | N | C, M, O, L, H |
| | RPIsPGLSY | Y | Y | Y | N | E, M, O, C, H |
| | RPKsPLSKM | Y | Y | Y | N | C, H |
| | RPKsVDFDSL | Y | Y | Y | N | C, M, H |
| | RPNsPSPTAL | Y | Y | Y | N | M, O, L, H |
| | RPPsPGPVL | Y | Y | Y | N | M, O, L, H |
| | RPRARsVDAL | Y | Y | Y | N | C, M, O, H, |
| | RPRPHsAPSL | Y | Y | Y | N | M, O, L, C, H |
| | RPRPVsPSSLL | Y | Y | Y | N | M, H |
| | RPRsAVEQL | Y | Y | Y | N | C, H |
| | RPRsISVEEF | Y | Y | Y | N | M, C, H |
| | RPRSL(ss)PTVTL | Y | Y | Y | N | O, M, H |
| | RPRsPNMQDL | Y | Y | Y | N | C, H |
| | RPRsPPGGP | Y | Y | Y | N | C, H |
| | RPRsPRQNSI | Y | Y | Y | N | C, E, L, M, O, H |
| | RPRsPTGPSNSF | Y | Y | Y | N | C, O, M, H |
| | RPRsPTGPSNSFL | Y | Y | Y | N | M, O, H |
| | RP(SS)LPDL | Y | Y | Y | N | M, O, L, H |
| | RPTsFADEL | Y | Y | Y | N | E, H |
| | RPTSRLNRL | Y | Y | Y | N | C, M, B, H, L |
| | RPVsPFQEL | Y | Y | Y | N | E, M, O, L, C, H |
| | RPYSPPFFSL | Y | Y | Y | N | M, O, L, H |
| | SPAsPKISL | Y | Y | Y | N | M, O, L, H |
| | SPFKRQLsL | Y | Y | Y | N | C, M, O, H |
| | TPRsPPLGL | Y | Y | Y | N | C, M, O, H, JY |
| | TPRsPPLGLI | Y | Y | Y | N | C, M, O, H, Jy |
| | VPRPERRsSL | Y | Y | Y | N | C, H |

### Example 4

### Identification of Class I MHC Phosphopeptide Antigens Presented by Cells Infected with Human Papillomavirus (HPV) and the Epstein Barr Virus (EBV)

[0343] To identify MHC class I phosphopeptide antigens presented on head-neck and cervical cancers, both of which are caused by the HPV virus, samples of the above tumors and the surrounding healthy or HPV infected tissue are analyzed. Approximately 50 tumor samples are employed to identify phosphopeptides presented by the ten major class I MHC alleles on the above cancers.

[0344] Also characterized are class I MHC phosphopeptide antigens that are presented on (a) normal endothelial cells and (b) endothelial cells transduced to express the HPV (type 16) E7 accessary protein that binds and inactivates the pRb protein. Keratinocytes are immortalized with a retroviral vector that encodes the human telomere reverse transcriptase hTERT as described in Dickson et al., 2000, which allows the cells to maintain telomere length and grow to numbers that are sufficient for these experiments. Anticipated results for these experiments are as follows. Sample (a) should present only a small number of phosphopeptides usually found on normal cells. Sample (b) should present the phosphopeptides found on sample (a) plus many of the phosphopeptide antigens already discovered on HPV infected tissue and on multiple types of cancer.

[0345] With respect to the Epstein Barr Virus (EBV), this virus causes Hodgkin's lymphoma, Burkitt's lymphoma, and both gastric cancer and nasopharyngeal carcinoma. Presentation of class I MEW phosphopeptides on normal B-cells and B-cells transfected with DNA for the EBV protein EBNA-3C (also known as EBNA 6) with and without immortalization by hTERT are performed. EBNA-3c mediates ubiquitination of and degradation of pRb, which in turn leads to high levels of transcription and upregulation of CIP2A. Anticipated results of these two experiments should be very similar to that described herein above for treatment T-cells with and without the PP2A inhibitor calyculin.

### Example 5

### Identification of Class I MHC Phosphopeptide Antigens Presented by Cells Infected with HIV

[0346] Beads covalently linked to an anti-HLA class I antigen antibody (W6-32; Abcam, Cambridge, United Kingdom) are employed to affinity purify class I MHC peptide complexes from three separate cultures of 5×10-CD4 T-cells. Sample #1 is MHC phosphopeptides from normal CD4 T-cells, Sample #2 are infected with HIV, and Sample #3 are infected with a strain of HIV that lacks the Nef protein. The Nef protein is expexted to suppress presentation of class I HLA-A, partially suppress HLA-B, and have no effect on HLA-C and E. Sample #1 is expected to show low levels of multiple phosphopeptides but not express any that have already been documented as being unique to multiple cancers. Sample #2 is expected to be devoid of HLA-A phosphopeptides, to show low levels of HLA B phosphopeptides (both those on sample #1 and new ones that are unique to the infection), and to show abundant HLA-C phosphopeptides that include those on the normal cells plus new ones that are also found on multiple cancers. Sample #3 is expected to present abundant phosphopeptides on all three HLA types: A, B, and C. Many of these are anticipated to be identical to those that have already been found on multiple cancers.

### Example 6

### Identification of Class I MEW Phosphopeptide Antigens on Cells Infected with MCPyV

[0347] Cells infected with MCPyV are expected to present the same MHC class I phosphopeptides as has been found on multiple tumors because the viral protein, LT, represses transcription of p53, a truncated version of LT inactivates pRb, and the ST protein inhibits PP2A. The MHC phosphopeptides presented on NSG mouse xenografts of normal human dermal fibroblast cells, with and without immortalization by hTert as described above, and both, with and without, transfection of the three viral proteins is tested. Only the samples transfected with the polyomavirus proteins are expected to present phosphopeptides observed on multiple tumors.

### Example 7

### Identification of Class I WIC Phosphopeptide Antigens on Cells Infected with H. pylori and Fn

[0348] Experiments to characterize WIC class I phosphopeptide antigens that are expressed by cells infected with the bacterium H. pylori are performed on human-derived normal fundic gastric organoids (huFGOs) and human-derived tumor gastric organoids (huTGOs) as described in Steele et al., 2019. Both samples are obtained with appropriate permission from healthy and diseased tissues surgically removed from patients. One sample of huFGOs (normal) is transfected with the gene for the H. pylori CagA protein. Xenografts of the three organoid samples (a) HuFGO, (b) HuFGO with transfected CagA protein, and (c) huTGO all on NSG mice are prepared according to Steele et al., 2019. Because the H. pylori protein CagA binds to E-cadherin and displaces β-catenin, it is anticipated that CIP2A is overexpressed in samples (b) and (c), that it inhibits PP2A, and thus generates many of the class I MHC phosphopeptide antigens that have already been found on multiple cancers. Few, if any, phosphopeptide antigens are presented on the normal sample (a).

[0349] Experiments to characterize class I MHC phosphopeptide antigens that are expressed by cells that are infected with gram negative anaerobe Fusobacterium nucleatum (Fn) are performed using NSG mouse xenografts of (A) surgically resected human colorectal cancer tissue, (B) healthy adjacent tissue (devoid of the Fn bacterium), and (C) healthy adjacent tissue that has been infected with Fn. The Fn protein FadA and the Fn lipopolysaccharide have been reported to activate β-catenin signaling that usually upregulates transcription, which results in generation of CIP2A and inhibition of PP2A. Accordingly, samples A and C present many of the Class I MHC phosphopeptide antigens that have already been found on multiple cancers, and few, if any, phosphopeptide antigens are found on sample B.

### Discussion of the EXAMPLES

[0350] A goal of the presently disclosed subject matter is to identify class I MHC phosphopeptides that (a) result from dysregulated cell signaling pathways in cancer, (b) are uniquely expressed on tumors but not normal cells, (c) are found on multiple types of cancer, (d) are recognized by central memory T-cells in PBMC from healthy blood donors, and (e) trigger killing by cytotoxic T-cells. More than 2000 class I MEW phosphopeptides presented by multiple HLA alleles (A*01, 02, 03, B*07, 44, 27, and C*04, C*05, 06, and 07) on leukemias (AML, ALL, and CLL), melanoma, breast, ovarian, colorectal, esophageal, and hepatocellular cancers have been identified (see e.g., U.S. Patent Application Publication No. 2015/0328297; 2016/0000893; 2019/0015494; 2019/0374627; and U.S. Pat. No. 9,561,266). Of these peptides, 70-80 percent are not on the corresponding normal cells or tissue and more than 1200 are found on multiple types of cancer. Of those tested, about 50% are recognized by central memory T-cells.

[0351] These results provided evidence that onset of cellular transformation occurs frequently in healthy individuals but can be controlled by an immune system response to class I MHC phosphopeptides. Leukemia patients, who are in control of their disease, usually have strong T-cell responses to class I MEW phosphopeptides. Late stage AML patients often lack phosphopeptide specific immunity but can recover it following stem cell transplantation. Particularly noteworthy is the finding that the same tumor specific phosphopeptides are found on multiple (3 to 8) different types of cancer. In short, it appears that a small cocktail of class I phosphopeptides could be used to treat all of the above cancers, particularly when used in combination with one or more check-point blockade inhibitors (e.g., anti-PD1, anti-PDL-1, anti-CTLA-4, etc.) that upregulate the immune response in the tumor microenvironment. Thus, class I MEW phosphopeptides are likely to be excellent targets for multiple cancer immunotherapy strategies.

[0352] An exemplary approach for prioritizing the phosphopeptides in the clinical trials could be as follows: select the phosphopeptide targets that (a) are presented by one of the 6 most common HLA alleles; (b) are detected on multiple tumor types and thus can be used to treat multiple cancers; (c) are not detected on healthy tissue; (d) are recognized by central memory T-cells from healthy blood donors that do not have autoimmune disease (which means that these peptides will likely elicit a strong immune response to the tumor and not to any other healthy tissue); (e) are derived from a parent protein that is associated with a known cancer signaling pathway; (f) are presented on the tumor at the level of 25-100 copies/cell; and (g) have a binding affinity to the MHC molecule that is in the low nanomolar range. For microbial infections, a similar approach can be taken.

[0353] Besides the identification of cancer specific class I MHC phosphopeptides, class I MHC peptides on tumors that result from dysregulation of two additional, critical cell signaling processes—methylation on Arg and Lys and O-GlcNAcylation on Ser and Thr—have also been identified. Both signaling pathways exhibit cross talk with phosphorylation and all three pathways play major roles in the transformation process. In leukemia cells, for example, 74 O-GlcNAcylated and 44 methylated Arg (monomethyl, sym-, and asym-dimethyl) containing class I MHC peptides have been characterized. Many of these peptides are also recognized by memory T-cells in PBMC from healthy blood donors. Thus, it is possible to enrich and detect tumor-specific, methylated, phosphorylated, and O-GlcNAcylated peptides from the same tumor sample of about 1-5×10⁷ cells (˜1-8 mm³ of tissue).

[0354] The presently disclosed subject matter also relates to compositions and methods for identifying post-translationally modified, class I MHC peptides that are uniquely presented on microbially infected cells. Significantly, new antigens that can be used for immunotherapy of multiple viral infections have been identified, as have antigens that are common to both cancer and specific microbial infections. Discovery of post-translationally modified antigens that are common to cancer and one or more microbial infections suggests that some of the central memory T-cells that recognize and kill cancer cells might have been generated from an earlier response to a infection rather that from immune surveillance of cancer. Discovery of such post-translationally modified antigens thus opens the door to the development of vaccination protocols against both diseases.

[0355] While not wishing to be bound by any particular theory of operation, the presently disclosed subject matter is supported by evidence that many class I MHC phosphopeptides are generated by dysregulated signaling pathways that occur in cancer. Since these peptides are not found on normal cells in the thymus or lymph nodes, tolerance to these antigens (deletion of high avidity T-cells) is not likely to develop. If the kinase or target protein is also required for the transformation process, angiogenesis, metastasis, or another critical tumor function, the tumor escapes by mutation or gene deletion without compromising tumor survival is also unlikely.

[0356] Development of a technology for the enrichment and sequence analysis of class I and class II phosphopeptides at the attomole level has also occurred. Critical improvements to the basic immobilized metal affinity chromatography (IMAC Fe⁺³) enrichment protocol include: (a) use of homemade 150 μm i.d.×360 μm o.d. fused silica, nanoflow HPLC column (5 μm C18 beads) to clean up the sample before the peptide esterification step; (b) use of shorter and smaller diameter IMAC columns (3″ of packing in 50 μm i.d. fused silica); (c) much longer equilibration times for loading FeCl₃ on the chelating resin to eliminate nonspecific binding of multiply charged, non-phosphorylated peptides to unoccupied, negatively-charged, metal-binding sites; (d) use of multiple phosphopeptide internal standards to quantitate recoveries for each step in the protocol and to act as carriers to minimize loss of low level class I phosphopeptides; and (e) development of an improved neutral loss algorithm that optimizes detection of phosphoric acid loss in the CAD spectrum of a phosphopeptide parent ion. All class I MHC peptide samples are screened by using 1×10⁷ cell equivalents (material from 10 million cells) and then IMAC enrichment is performed on material from 1-2×10⁸ cells. Class I MHC phosphopeptides are sequenced at the 5-50 attomole level (less than 1 copy/cell). Total phosphopeptide quantities in the sample seldom exceed 100 fmol and yet typical recoveries are in the range of 50-60%.

[0357] Additionally, technology for the enrichment and sequence analysis of class I MHC O-GlcNAcylated peptides at the attomole level has also been developed. Here, an innovation involves esterification of the O-GlcNAc moiety with immobilized aminophenylboronic acid under anhydrous conditions. POROS20 AL beads are covalently linked to aminophenylboronic acid with sodium cyano borohydride. Cleaned-up samples of MHC peptides are then taken to dryness, dissolved in anhydrous DMF, and allowed to react with the derivatized beads for 2 hours at room temperature. Solvent is then removed and the O-GlcNAcylated peptides are released on treatment of the beads with 0.1% acetic acid.

[0358] Additionally, mass spectrometry instrumentation and protocols that facilitate sequence analysis of post-translationally modified peptides at the attomole level have been developed. Key innovations here include: (a) development of nanoflow (60 nl/min) chromatography on homemade columns with built in laser pulled tips for highly efficient electrospray ionization; (b) butt-connection of additional columns to perform efficient sample clean-up and IMAC for enrichment of phosphopeptides; (c) the use of Electron Transfer Dissociation (ETD) Mass Spectrometry (Syka et al., 2004) for efficient dissociation of posttranslationally modified peptides (without loss of the modification); and (d) development of a front-end ETD ion source that allows multistep accumulation of ion current from ETD fragments so as to further enhance sensitivity (Earley et al., 2013) and facilitate sequence analysis of phosphopeptides at the level of 5-10 attomoles.

[0359] Additionally, an improved ELISpot assay was employed for detection of central memory, T-cell recall-responses to post translationally modified, class I MHC, tumor antigens in PBMC from healthy blood donors. This assay dramatically reduced the time and effort (weeks to days) required to select the best class I MHC antigens for use in cancer immunotherapy (Hunt et al., 2007).

### REFERENCES

[0360] All references listed below, as well as all references cited in the instant disclosure, including but not limited to all patents, patent applications and publications thereof, scientific journal articles, and database entries (e.g., GENBANK® and UniProt biosequence database entries and all annotations available therein) are incorporated herein by reference in their entireties to the extent that they supplement, explain, provide a background for, or teach methodology, techniques, and/or compositions employed herein.
[0361] Abelin et al. (2015) Nature Protocols 10:1308-1318.
[0362] Akamatsu et al. (1997) Bioorg Med Chem 5:157-163.
[0363] Altschul et al. (1990) J. Mol. Biol. 215:403-410.
[0364] Altschul et al. (1997, Nucleic Acids Res. 25:3389-3402.
[0365] Biggar & Li (2015) Nat Rev Mol Cell Biol 16:5-17.
[0366] Bodanszky & Bodanszky (1984) in The Practice of Peptide Synthesis, Springer-Verlag, New York, New York.
[0367] Brahmer et al. (2012) N Engl J Med 366:2455-2465.
[0368] Caldwell et al. (2010) Oncogene 29:2831-42.
[0369] Cante-Barrett et al. (2014) Oncogene 33:403-410.
[0370] Chothia et al. (1985) J Mol Biol 186:651-666.
[0371] Chothia et al. (1989) Nature 342:877-883.
[0372] Civan & Hann (2014) N A J Med Sci 7:8-16.
[0373] Clackson et al. (1991) Nature 352:624-628.
[0374] Clark et al. (1989) Eur J Immunol 19:381-388.
[0375] Cobbold et al. (2013) MHC Class I-Associated Phosphopeptides are theTargets of Memory-Like Immunity in Leukemia, Sci Transl Med 5:203ra125.
[0376] Cole et al. (1985) Proc Natl Acad Sci USA 82:859.
[0377] Cote et al. (1983) Proc Natl Acad Sci USA 80:2026.
[0378] Cox et al. (1994) Science 264:716-719.
[0379] Current Protocols in Immunology (1990-2019) Wiley Interscience, Hoboken, New Jersey, United States of America.
[0380] De Queiroz et al. (2014) Frontiers in Oncology 4(132):1-10.
[0381] Dickson et al. (2000) Mol Cell Biol 20;1436-1447.
[0382] Diehl & Schaal (2012) Viruses 5:3192-3212.
[0383] Dudley et al. (2008) J Clin Oncol 26(32):5233-9.
[0384] Dunn et al. (2004) Annu Rev Immunol 22:329-360.
[0385] Earley et al. (2013) Anal Chem 85(17):8385-8390.
[0386] Fishwild et al. (1996) Nature Biotechnol 14:845.
[0387] Gattinoni et al. (2006) Nature Rev Immunol 6:383-393.
[0388] GB Patent Application No. 2249310A
[0389] Gennaro (1990) Remington's Pharmaceutical Sciences, Mack Publishing, Easton, Pa., United States of America.
[0390] Gross & Mienhofer (1981) The Peptides, vol. 3 Academic Press, New York, N.Y., United States of America, pp. 3-88.
[0391] Gubin et al. (2015) J. Clin Invest 125:3413-3421.
[0392] Guergnon et al. (2011) Biochim Biophys Acta 1812:1498-1507.
[0393] Haesen et al. (2014) Frontiers in Oncology 4:1-11.
[0394] Hanahan & Weinberg (2011) Cell 144:646-674.
[0395] Hodi et al. (2010) N Engl J Med 363:711-723.
[0396] Hogan et al. (1998) Cancer Res. 58:5144-5150.
[0397] Hoogenboom et al. (1991) Nucleic Acids Res 19:4133.
[0398] Hunt et al. (1992a) Science 255:1261-1263.
[0399] Hunt et al. (1992b) Science 256:1817-1820.
[0400] Hunt et al. (2007) J. Immunol 179:2690-71.
[0401] Jones et al. (1986) Nature 321:522-525.
[0402] Kabat et al. (1987) Sequences of Proteins of Immunological Interest, National Institute of Health, Bethesda, Md., United States of America.
[0403] Karlin & Altschul (1990) Proc. Natl. Acad. Sci. USA 87:2264-2268.
[0404] Karlin & Altschul (1993) Proc. Natl. Acad. Sci. USA 90:5873-5877.
[0405] Khanna et al. (2013) Cancer Res 73:6548-6553.
[0406] Kiely & Kiely (2015) Cancers 7:648-669.
[0407] Kittlesen et al. (1998) J Immunol 60:2099-2106.
[0408] Kohler & Milstein (1975) Nature 256:495.
[0409] Kozbor et al. (1983) Hybridoma, 2:7.
[0410] Lanier et al. (2010) Bioorganic & Medicinal Chemistry 18:573-579
[0411] LeFranc & LeFranc (2001) The T Cell Receptor Factsbook, ISBN 0-12-441352-8, Academic Press, San Diego, Calif., United States of America.
[0412] Liddy et al. (2012) Nature Med 18(6):980-987.
[0413] Lonberg & Huszar (1995) Intl Rev Immunol 13:65.
[0414] Lonberg et al. (1994) Nature 368:856.
[0415] Lynch et al. (2012) J Biol Chem 287(14):11070-81.
[0416] Mackensen et al. (2000) Int J Cancer 86:385-392.
[0417] Malaker et al. (2017) J Proteome Res 16:228-237.
[0418] Marino et al. (2015) J Am Chem Soc 137:10922-10925.
[0419] Marino et al. (2017) J Proteome Res 16:34-44.
[0420] Marks et al. (1991) J Mol Biol 222:581-597.
[0421] Marks et al. (1992) J Biol Chem 267:16007.
[0422] Martin et al. (2000) Anal Chem 72:4266-4274.
[0423] Matsushita et al. (2012) Nature 16;482:405-410.
[0424] McGranahan et al. (2016) Science 351:1463-1469.
[0425] Melief (2009) J Med Sci 2:43-45.
[0426] Mihara et al. (2001) Clin Immunol 98:319.
[0427] Morales et al. (2000) Nucl Med Biol 27:199.
[0428] Morgan & Gainor (1989) Ann Repts Med Chem 24:243-252
[0429] Murphy (2012) Janeway's Immunobiology, 8th Edition, Garland Science, New York, N.Y., United States of America.
[0430] Neuberger (1996) Nature Biotechnol 14:826.
[0431] Novotny & Haber (1985) Proc Natl Acad Sci USA 82:4592-4596.
[0432] Otaka et al. (1995) Tetrahedron Lett 36:927-930.
[0433] Pardoll (2012) National Reviews of Cancer, Focus on Tumor Immunology & Immunotherapy, 254, April 2012, Volume 12.
[0434] Parmiani & Anichini (2006) J Hepatol 45:178-181.
[0435] Nature Rev Cancer 12:252-264.
[0436] PCT International Patent Application Publication Nos. WO 1994/02602; WO 1996/33735; WO 1996/34096; WO 1999/54464; WO 1999/61065; WO 2002/070006; WO 2004/106380; WO 2004/110486; WO 2011/149909; WO 2013/177593; WO 2014/036562; WO 2014/036562; WO 2014/039675; WO 2014/039675; WO 2014/093855; WO 2015/034519; WO 2015/120036; WO 2017/027403; WO 2017/192969.
[0437] Perrotti & Neviani (2013) Lancet Oncology 14:e229-e238.
[0438] Pim et al. (2005) Oncogene 24:7830-7838.
[0439] Pippa et al. (2014) Leukemia 28:1915-1918.
[0440] Porter et al. (2011) N Engl J Med 365(8):725-33.
[0441] Presta (1992) Proc Natl Acad Sci USA 89:4285-4289.
[0442] Prieto et al. (2015) Nat Rev Gastroenterol Hepatol 12:681-700.
[0443] Rapp & Kaufmann (2004) Int Immunol 16(4):597-605.
[0444] Remington & Gennaro (1995) Remington: The Science and Practice of Pharmacy, Mack Publishing, Easton, Pa., United States of America.
[0445] Restifo et al. (2012) J Exp Med 12:269-281.
[0446] Richards et al. (1999) Cancer Res 59:2096.
[0447] Riechmann et al. (1988) Nature 332:323-327.
[0448] Rowe et al. (eds.) (2006) Handbook of Pharmaceutical Excipients, 5^{th} ed. Pharmaceutical Press, London, United Kingdom.
[0449] Ruvolo (2006) BBA Clinical 6:87-99.
[0450] Sage et al. (2016) Viruses 8:1-19.
[0451] Sandborn et al. (2001) Gastroenterology 120:1330-1338.
[0452] Sangodkar et al. (2016) FEBS J 283:1004-1024.
[0453] Schreiber et al. (2011) Science 331:1565-1570.
[0454] Schumacher & Schreiber (2015) Science 348:69-73.
[0455] Shamay et al. (2012) J Virology 86:5179-5191.
[0456] Shinkura et al. (1998) Anticancer Res 18:1217.
[0457] Slawson & Hart (2011) Nat Rev Cancer 11(9):678-84.
[0458] Smyth et al. (1992) Tetrahedron Lett 33:4137-4140.
[0459] Soderholmm et al. (2016) Mol Cell Proteomics 15:3203-3219.
[0460] Sontag & Sontag (2014) Frontiers in Mol Neuroscience 7:1-10.
[0461] Spatola (1983) Chemistry and Biochemistry of Amino Acids, Peptides and Proteins, Vol. VII (Weinstein ed.) Marcel Dekker, New York, N.Y., United States of America
[0462] Steele et al. (2019) Cellular and Molecular Gastroenterology and Hepatology 7;161-184.
[0463] Stewart et al. (1984) in Solid Phase Peptide Synthesis, 2nd Edition, Pierce Chemical Company, Rockford, Ill., United States of America.
[0464] Stopa et al. (2015) Cellular and Molecular Life Sciences 72:2041-2059.
[0465] Strickley (2004) Pharm Res 21:201-230.
[0466] Syka et al. (2004) Proc Natl Acad Sci USA 101(26):9528-33.
[0467] Topalian et al. (2012) N Engl J Med 366:2443-2454.
[0468] U.S. Patent Application Publication Nos. 2002/0119149; 2004/0202657; 2008/0153112; 2009/0117102; 2009/0226474; 2010/0297158; 2013/0259883; 2013/0259883; 2015/0328297; 2016/0000893; 2017/0029484; 2018/0066017; 2019/0015494; 2019/0374627.
[0469] U.S. Pat. Nos. 4,361,539; 4,816,567; 5,225,539; 5,545,806; 5,545,807; 5,569,825; 5,625,126; 5,633,425; 5,661,016; 5,789,543; 5,916,771; 5,939,598; 5,968,509; 6,207,718; 6,706,265; 6,750,325; 8,012,932; 8,119,984; 8,211,436; 8,692,187; 9,171,707; 9,279,011; 9,279,011; 9,561,266; 10,281,473.
[0470] Van Wauve (1980) J Immunol 124:2708-2718.
[0471] Verhoeyen et al. (1988) Science 239:1534-1536.
[0472] Vesely et al. (2011) Annu Rev Immunol 29:235-271.
[0473] Wang et al. (2010) Sci Signal 3(104):ra2.
[0474] Wells et al. (2004) J Biol Chem 279(37):38466-38470.
[0475] Welters et al. (2004) Vaccine 23(3):305-311.
[0476] Whittaker et al. (2010) Oncogene 29:4989-5005.
[0477] Wojcechowskyj et al. (2013) Cell Host & Microbe 13:613-623.
[0478] Yadav et al. (2014) Nature 515:572-576.
[0479] Yamashita et al. (2011) J Gastroenterol Hepato! 26:960-964.
[0480] Yang & Bedford (2013) Nat Rev Cancer 13:37-50.
[0481] Yee et al. (2002) Proc Natl Acad Sci USA 99:16168-16173.
[0482] Yenari et al. (1998) Exp Neurol 153:223.
[0483] Yenari et al. (2001) Neurol Res 23:72.
[0484] Zarling et al. (2006) Proc Natl Acad Sci USA 103:14889-14894.
[0485] Zhang & Claret (2012) Enzyme Res 2012:Article 659649.
[0486] Zugel (2001) Infect Immun 69(6):4164-4167.

[0487] While the presently disclosed subject matter has been disclosed with reference to specific embodiments, it is apparent that other embodiments and variations of the presently disclosed subject matter may be devised by others skilled in the art without departing from the true spirit and scope of the presently disclosed subject matter.

TABLE 6
Exemplary Peptides of the Presently
Disclosed Subject Matter

| SEQ | | | |
|---|---|---|---|
| ID | | | |
| NO: | SEQUENCE | | |
| 8 | AAsDTERDGLA | 152 | APYRGQLAsPSSQ |
| 10 | AAsPGAPQM | 154 | ARAsPRLHFL |
| 12 | ADsGEGDFLAEGGGVR | 155 | ARFsGFYSM |
| 13 | AEAPLPsPKL | 155 | ARFSGFYsM |
| 20 | AEFPSSGsNSVL | 162 | ARFsPKVSL |
| 28 | AELsPVEQKL | 163 | ARGsLRRLL |
| 30 | AENARSAsF | 167 | ARVsPSTSY |
| 31 | AENsPTRQQF | 174 | ASEsPSSLIFY |
| 36 | AEQGsPRVSY | 181 | ASLsRPLNY |
| 37 | AERtPELVEL | 182 | ASMsPGHPTHL |
| 44 | AGDsPGSQF | 186 | ASsPPDRIDIF |
| 46 | AIMRsPQMV | 188 | ASSsQIIHI |
| 49 | ALAAPsPPR | 189 | AtAGPRLGW |
| 51 | ALDsGASLLHL | 189 | AtAGPRLGw |
| 55 | ALGNtPPFL | 196 | ATIPRPFsV |
| 65 | ALMGsPQLV | 197 | ATMKRMLsL |
| 66 | ALMGsPQLVAA | 199 | ATYtPQAPK |
| 86 | AMDsPLLKY | 202 | AVILPPLsPYFK |
| 100 | APAsPLRPL | 204 | AVVsPPALHNA |
| 102 | APAsPRLL | 206 | AyAQPQTTTPLPAVSG |
| 105 | APDsPRAFL | 208 | AYGGLTsPGLSY |
| 106 | APDsPSKQL | 224 | DERLRINsL |
| 120 | APRKGsFSAL | 227 | DETERAYsF |
| 125 | APRNGsGVAL | 228 | DGRRtFPRI |
| 127 | APRRYsSSL | 231 | DLKRRsMSI |
| 133 | APRsPPPSRP | 235 | DLKSSKAsL |
| 137 | APSLFHLNtL | 245 | DQFERIKtL |
| 258 | DSsEEKF | 255 | DsFESIESY |
| 260 | DSsEEKFLR | 257 | DssEEK |
| 263 | DSVsPSESL | 437 | GAVsPVGEL |
| 269 | DVYSGtPTKV | 445 | GEAsPSHII |
| 280 | EELsPTAKF | 450 | GEIsPQREV |
| 297 | ELLPRRNsL | 454 | GELPTsPLHLL |
| 302 | EPKRRsARL | 464 | GETsPRTKI |
| 305 | EPRNSLPAsPAHQL | 465 | GETsPRTKITW |
| 308 | EPRsPSHSM | 469 | GGDsPVRL |
| 323 | FASPTsPPVL | 471 | GGPHFsPEHKEL |
| 324 | FATIRTAsL | 477 | GIDsPSSSV |
| 325 | FAVsPIPGRGGVL | 478 | GIFPGtPLKK |
| 328 | FAYsPGGAHGML | 479 | GIMsPLAKK |
| 341 | FKtQPVTF | 484 | GLDsGFHSV |
| 346 | FLDtPIAKV | 491 | GLIsPVWGA |
| 358 | FPAsPSVSL | 493 | GLLDsPTSI |
| 368 | FPLARQFsL | 503 | GLSsLSIHL |
| 369 | FPLDsPKTLVL | 504 | GLTsPGLSY |
| 373 | FPRRHsVTL | 422 | GPPYQRRGsL |
| 384 | FRFsGRTEY | 527 | GPRASsLLsL |
| 385 | FRGRYRsPY | 529 | GPRPGsPSAL |
| 386 | FRKsMVEHY | 533 | GPRSAsLL |
| 387 | FRRsPTKSSL | 535 | GPRSASLLsL |
| 389 | FRRsPTKSSLD | 538 | GPRsPKAPP |
| 394 | FRRsPTKSSLDY | 541 | GQLsPGVQF |
| 402 | FRYsGKTEY | 524 | GRKsPPPSF |
| 413 | FSIsPVRL | 554 | GRLsPAYSL |
| 418 | FSVAsPLTL | 565 | GRLSPVPVPR |
| 420 | FSYsPRLPL | 567 | GRQsPSFKL |
| 422 | FTDVNsILRY | 580 | GSDVsLTAcKV |
| 426 | FTKsPYQEF | 582 | GsGPEIFTF |
| 436 | GATTTAPsL | 583 | GSKsPISQL |
| 586 | GsPHYFSPFRPY | 584 | GsPHYFSPF |
| 587 | GsPIKVTL | 588 | GsPHYFSPFRP |
| 588 | GsPIKVTLA | 714 | IRFGRKPsL |
| 594 | GTIRSRsFIFK | 733 | ISIDsPQKL |
| 602 | GTVtPALKL | 735 | ISSsMHSLY |
| 603 | GTYVPSSPTRLAY | 738 | IsTSPSVAL |
| 605 | GVIsPQELLK | 738 | IStSPSVAL |
| 606 | GVIsPQELLKK | 738 | ISTsPSVAL |
| 609 | GYVQRNLSLVRG | 738 | IstSPSVAL |
| 622 | HPKRSVsL | 738 | IsTsPSVAL |
| 638 | HPYsPLPGL | 738 | IStsPSVAL |
| 652 | HRVsVILKL | 738 | IstsPSVAL |
| 654 | HRYsTPHAF | 740 | ISVsPLATSAL |
| 654 | HRYStPHAF | 755 | ITItPPDRY |
| 654 | HRYstPHAF | 785 | ITQGtPLKY |
| 654 | HRYsTPHAF | 762 | ITYMsPAKL |
| 656 | HTAsPTGMMK | 769 | IYQyIQSRF |
| 657 | HTFsPSPKL | 771 | IYYKsMPNL |
| 661 | HVYtPSTTK | 775 | KAFsPVR |
| 665 | IAKsPHSTV | 777 | KAFsPVRSV |
| 671 | IIHsLETKL | 777 | KAFsPVRSV |
| 674 | IISsPLTGK | 781 | KAKsPAPGL |
| 678 | ILDsGIYRI | 783 | KAPsPPPLL |
| 681 | ILKPRRsL | 784 | KAPsRQISL |
| 694 | IPAPPSsPL | 789 | KASPKRLsL |
| 698 | IPLSKIKtL | 790 | KAVsLFLc |
| 699 | IPRPLSLIGSTL | 794 | KEKsPFRET |
| 700 | IPRsPFKVKVL | 796 | KELARQIsF |
| 701 | IPRTPLsPSPM | 799 | KEMsPTRQL |
| 709 | IPVSSHNSL | 802 | KEQsPEPHL |
| 710 | IPYAPsGEIPK | 803 | KESSPLSSRKI |
| 711 | IQFsPPFPGA | 804 | KEStLHLVL |
| 813 | KIDsPTKVK | 805 | KEtPDKVEL |
| 817 | KIFsGVFVK | 811 | KIAsEIAQL |
| 818 | KIFsGVFVKV | 1036 | KPPYRSHsL |
| 821 | KIGsIIFQV | 1039 | KPQTRGKtF |
| 823 | KIIsIFSG | 1043 | KPRPLsMDL |
| 824 | KIIsIFSGTEK | 1047 | KPRPPPLsP |
| 825 | KIKsFEVVF | 1049 | KPRRFsRSL |
| 832 | KIRPHIAtL | 1051 | KPRsPDHVL |
| 852 | KLFPDtPLAL | 1054 | KPRsPFSKI |
| 866 | KLIDRTEsL | 1056 | KPRsPPRAL |
| 870 | KLKDRLPsI | 1062 | KPRsPPRALVL |
| 881 | KLLDFGsLSNLQV | 1073 | KPRsPVVEL |
| 898 | KLMsDVEDV | 1077 | KPSsPRGSL |
| 900 | KLMsPKADVKL | 1078 | KPSsPRGSLL |
| 902 | KLPDsPALA | 1080 | KPVsPKSGTL |
| 903 | KLPDsPALAK | 1083 | KPYsPLASL |
| 904 | KLPDsPALAKK | 1087 | KQKsLTNLSF |
| 908 | KLPsPAPARK | 1096 | KRAsFAKSV |
| 915 | KLRsPFLQK | 1112 | KRAsVFVKL |
| 921 | KLSGLsF | 1116 | KRAsYILRL |
| 932 | KLwtLVSEQTRV | 1119 | KRFsFKKSF |
| 937 | KLYTyIQSRF | 1120 | KRFsFKKsFKL |
| 943 | KMDsFLDMQL | 1132 | KRFsGTVRL |
| 980 | KMPTtPVKAK | 1136 | KRFsLDFNL |
| 1001 | KPAsPARRL | 1137 | KRIsIFLSM |
| 1006 | KPAsPKFIVTL | 1140 | KRKsFTSLY |
| 1011 | KPFKLSGLsF | 1142 | KRLEKSPsF |
| 1012 | KPGLGEGtP | 1145 | KRLsPAPQL |
| 1017 | KPPHsPLVL | 1151 | KRLsVELTSSLF |
| 1021 | KPPsPEHQSL | 1160 | KRMsNELENY |
| 1027 | KPPsPSPIEM | 1166 | KRMsPKPEL |
| 1029 | KPPtPGASF | 1175 | KRMsVTEGGIKY |
| 1183 | KRWQsPVTK | 1179 | KRsPIFF |
| 1190 | KRYsGNMEY | 1182 | KRTsKYFSL |
| 1191 | KRYsRALYL | 1275 | LESPTtPLL |
| 1195 | KSDsPSTSSI | 1277 | LIDNsFNRY |
| 1198 | KSKsMDLGI | 1280 | LLARtPPAA |
| 1206 | KSPTsPLNM | 1282 | LLDPSRSYsY |
| 1208 | KsSSLDKQL | 1290 | LLNKtPPTA |
| 1208 | KSsSLDKQL | 1291 | LMFsPVTSL |
| 1208 | KSSsLDKQL | 1297 | LPAFKRKtL |
| 1214 | KSYsRSRsR | 1299 | LPAsPAHQL |
| 1219 | KTFsIGKIAK | 1305 | LPAsPRARL |
| 1226 | KTMsGTFLL | 1309 | LPAsPSVSL |
| 1230 | KTPTsPLKM | 1214 | LPIFSRLsI |
| 1231 | KTPTsPLKMK | 1320 | LPKGLSAsL |
| 1234 | KTRsLSVEI | 1325 | LPLsPKETV |
| 1235 | KTRsLsVEIVY | 1329 | LPRGSsPSVL |
| 1235 | KTRsLSVEIVY | 1334 | LPRPAsPAL |
| 1238 | KTVsPSPAF | 1338 | LPRSSsMAA |
| 1240 | KVAsLLHQV | 1339 | LPRSSsMAAGL |
| 1241 | KVDsPTVTTTL | 1346 | LPSSGRSsL |
| 1242 | KVDsPVIF | 1348 | LPTsPLAMEY |
| 1247 | KVKSsPLIEKL | 1351 | LPYPVsPKQKY |
| 1252 | KVLsSLVTL | 1353 | LQIsPPLHQHL |
| 1252 | KVLSSLVTL | 1354 | LQIsPVSSY |
| 1252 | KVLssLVTL | 1359 | LSAsFRSLY |
| 1262 | KVQsLRRAL | 1365 | LSDsPSMGRY |
| 1265 | KVYtPSISK | 1374 | LSSsPPATHF |
| 1266 | KYELsVIM | 1377 | LTDPSsPTIS |
| 1270 | LADsPLKL | 1388 | LTLsPKLQL |
| 1274 | LEItPPSSEKL | 1389 | LTSsRLLKL |
| 1275 | LESPTtPLL | 1391 | LVAsPRLEK |
| 1275 | LESPttPLL | 1393 | LVVsPGQQTL |
| 1413 | MPsPGGRITLM | 1394 | LYTyIQSRF |
| | RLsRELQL | | |
| 1433 | MTRsPPRVSK | 1409 | MPRQPsATRL |
| 1436 | NAIsLPTI | 1563 | RAHsEPLAL |
| 1449 | NMDsPGPML | 1565 | RAHSsPASL |
| 1452 | NPsSPEFFM | 1566 | RAHtPTPGIYM |
| 1452 | NPSSPEFFM | 1567 | RAIsPREKI |
| 1452 | NPssPEFFM | 1569 | RAKsPISLK |
| 1458 | NRMsRRIVL | 1572 | RALsSSVIREL |
| 1472 | NSLsPRSSL | 1576 | RAPsPSSRM |
| 1484 | PLVSSSDsPPRPQPAF | 1578 | RARGIsPIVF |
| 1488 | PRFsLDAEIDSL | 1579 | RAsSDIVSL |
| 1489 | PRPANsGGVDL | 1579 | RASsDIVSL |
| 1490 | PRPsPGSNSKV | 1579 | RASSDIVsL |
| 1491 | PRPsPRQNSI | 1579 | RAssDIVSL |
| 1492 | PRQRAtSNVF | 1579 | RAsSDIVsL |
| 1494 | PRWsPAVSA | 1579 | RASsDIVsL |
| 1498 | PtSPLAMEY | 1579 | RAssDIVsL |
| 1498 | PTsPLAMEY | 1586 | RATsNVFAM |
| 1498 | PtsPLAMEY | 1587 | RATsPLVSL |
| 1499 | PVRdPTRSP | 1588 | RATsRcLQL |
| 1500 | PWIPPSsPTTF | 1589 | RAVsPFAKI |
| 1507 | QLDRIsVYY | 1590 | REAPsPLMI |
| 1508 | QLDsPQRALY | 1592 | REAsPAPLA |
| 1517 | QPRsPGPDYSL | 1593 | REAsPLSSNKLIL |
| 1527 | QPRtPSPLVL | 1594 | REAsPRLRV |
| 1527 | QPRtPsPLVL | 1595 | REAsPSRLSV |
| 1534 | QPSsPRVNGL | 1600 | REIMGtPEYL |
| 1536 | QRLsPLSAAY | 1602 | REKsPGRML |
| 1542 | QTIsPLSTY | 1606 | RELARKGsL |
| 1546 | QVDPKKRIsM | 1607 | RELsGTIKEIL |
| 1552 | RADsPVHM | 1608 | RELsPLISL |
| 1561 | RAFsVKFEV | 16611 | REPsPALGPNL |
| 1616 | RERsPSPSF | 1612 | REPsPLPEL |
| 1618 | REsPIPIEI | 1614 | REPsPVRYDNL |
| 1620 | RESSPTRRL | 1730 | RLFVGsIPK |
| 1621 | REtSPNRIGL | 1737 | RLIsQIVSSI |
| 1621 | RETsPNRIGL | 1743 | RLKsIEERQLLK |
| 1621 | REtsPNRIGL | 1755 | RLLDPSSPLAL |
| 1623 | REVsPAPAV | 1756 | RLLDRSPsRSAK |
| 1628 | REYGsTSSI | 1772 | RLLsPPLRPR |
| 1629 | RFKtQPVTF | 1773 | RLLsPQQPAL |
| 1630 | RFsFKKSF | 1779 | RLLsTDAEAV |
| 1631 | RGDGYGtF | 1800 | RLPtRLPEI |
| 1636 | RHPKRSVsL | 1814 | RLRSsLVFK |
| 1637 | RIDIsPSTL | 1821 | RLSDtPPLL |
| 1640 | RIHGsPLQK | 1825 | RLSsLRASTSK |
| 1642 | RILsGVVTK | 1827 | RLSsPISKR |
| 1650 | RIPsVQINF | 1829 | RLSsPLHFV |
| 1656 | RIStPLTGV | 1844 | RLYKsEPEL |
| 1657 | RITsLIVHV | 1910 | RMLsLRDQRL |
| 1659 | RIYQyIQ | 1948 | RMYsFDDVL |
| 1661 | RIYQyIQSR | 1966 | RNLsSPFIF |
| 1662 | RIYQyIQSRF | 1967 | RPAFFsPSL |
| 1664 | RIYQyIQSRFY | 1969 | RPAKsMDSL |
| 1672 | RKLsVILIL | 1974 | RPAsAGAML |
| 1675 | RKPsIVTKY | 1978 | RPAsARAQPGL |
| 1677 | RKSsIIIRM | 1983 | RPAsPAAKL |
| 1687 | RLAsLQSEV | 1987 | RPAsPEPEL |
| 1703 | RLAsYLDRV | 1988 | RPAsPGPSL |
| 1715 | RLDsYVRSL | 1989 | RPAsPLMHI |
| 1721 | RLFsHPREPAL | 1990 | RPAsPQRAQL |
| 1722 | RLFsKEL | 1991 | RPAsPSLQL |
| 1723 | RLFsKELR | 1992 | RPAsPSLQLL |
| 1725 | RLFsKELRC | 1996 | RPAsYKKKSML |
| 2012 | RPDsRLGKTEL | 1997 | RPAtFFPFVA |
| 2015 | RPDsRLLEL | 2009 | RPDsPTRPTL |
| 2016 | RPDVAKRLsL | 2135 | RPQRAtsNVF |
| 2025 | RPEsPAGPF | 2135 | RPQRATsNVF |
| 2026 | RPFHGISTVsL | 2141 | RPRAAtVV |
| 2028 | RPFsPREAL | 2142 | RPRAAtVVA |
| 2035 | RPGsRQAGL | 2144 | RPRANsGGVDL |
| 2037 | RPHsPEKAF | 2147 | RPRARsVDAL |
| 2041 | RPHtPTPGI | 2148 | RPRDTRRIsL |
| 2042 | RPHtPTPGIYM | 2150 | RPRGsESLL |
| 2047 | RPIsPGLSY | 2152 | RPRGsQSLL |
| 2048 | RPIsPPHTY | 2155 | RPRHsLNSL |
| 2049 | RPIsPRIGAL | 2156 | RPRIPsPIGF |
| 2050 | RPIsVIGGVSL | 2157 | RPRPAsSPAL |
| 2052 | RPItPPRNSA | 2158 | RPRPGtGLGRVm |
| 2057 | RPKLHHSLsF | 2160 | RPRPHsAPSL |
| 2059 | RPKLSSPAL | 2163 | RPRPSsAHVGL |
| 2064 | RPKPSSsPV | 2164 | RPRPsSVL |
| 2069 | RPKsNIVLL | 2164 | RPRPSsVL |
| 2073 | RPKsPLSKM | 2164 | RPRPssVL |
| 2079 | RPKsVDFDSL | 2168 | RPRPVsPSSL |
| 2082 | RPKtPPVVI | 2169 | RPRPVsPSSLL |
| 2089 | RPLSLLLAL | 2176 | RPRsAVEQL |
| 2106 | RPMsESPHM | 2178 | RPRsAVLL |
| 2108 | RPNsPSPTAL | 2181 | RPRSGsTGSSL |
| 2110 | RPPItQSSL | 2181 | RPRSGStGSSL |
| 2119 | RPPsPGPVL | 2181 | RPRSGstGSSL |
| 2127 | RPPsSEFLDL | 2183 | RPRsISVEEF |
| 2131 | RPPtPTLSL | 2183 | RPRSIsVEEF |
| 2131 | (diMe)RPPItQSSL | 2183 | RPRsIsVEEF |
| 2135 | RPQRAtSNVF | 2187 | RPRsLEVTI |
| 2135 | RPQRATsNVF | 2193 | RPRSLsSPTVTL |
| 2197 | RPRsMTVSA | 2194 | RPRSLSsPTVTL |
| 2198 | RPRsMVRSF | 2194 | RPRSLssPTVTL |
| 2200 | RPRsPAARL | 2275 | RPsSPALYF |
| 2204 | RPRsPGSNSKVP | 2275 | RPSsPALYF |
| 2205 | RPRsPNMQDL | 2275 | RPssPALYF |
| 2206 | RPRsPPGGP | 2282 | RPSsPSTSw |
| 2210 | RPRsPPPRAP | 2283 | RPSsRAVLY |
| 2212 | RPRsPPSSP | 2293 | RPsTPTIDVL |
| 2214 | RPRsPRENSI | 2293 | RPStPTIDVL |
| 2218 | RPRsPRPPP | 2293 | RPstPTIDVL |
| 2221 | RPRsPRQNSI | 2297 | RPTsFADEL |
| 2227 | RPRsPSPIS | 2298 | RPTsISwDGL |
| 2227 | RPRSPsPIS | 2299 | RPtSPIQIM |
| 2227 | RPRsPsPIS | 2299 | RPTsPIQIM |
| 2234 | RPRsPTGP | 2299 | RPtsPIQIM |
| 2235 | RPRsPTGPSNSF | 2302 | RPTsRLNRL |
| 2236 | RPRsPTGPSNSFL | 2310 | RPVsPFQEL |
| 2240 | RPRsPTGsNSF | 2314 | RPVsPGKDI |
| 2246 | RPRsPWGKL | 2319 | RPVsPHSDF |
| 2247 | RPRsQYNTKL | 2321 | RPVsPSAYm |
| 2250 | RPRtPLRSL | 2323 | RPVsPSSLL |
| 2255 | RPsLGGRTPL | 2324 | RPVsTDFAQY |
| 2258 | RPSRSsPGL | 2326 | RPVtPITNF |
| 2262 | RPsSAPDLM | 2330 | RPVtPVSDL |
| 2262 | RPSsAPDLM | 2334 | RPWsNSRGL |
| 2262 | RPssAPDLM | 2334 | RPwsNSRGL |
| 2263 | RPsSGFYEL | 2336 | RPWsPAVSA |
| 2263 | RPSsGFYEL | 2336 | RPwsPAVSA |
| 2263 | RPssGFYEL | 2345 | RPYsPPFFSL |
| 2270 | RPsSLPDL | 2348 | RPYsPSEYAL |
| 2270 | RPSsLPDL | 2350 | RPYsQVNVL |
| 2270 | RPssLPDL | 2352 | RQAsIELPSM |
| 2362 | RQDsTPGKVFL | 2353 | RQAsIELPSMAV |
| 2366 | RQIsQDVKL | 2356 | RQAsLSISV |
| 2371 | RQKsPLFQF | 2482 | RRGsGPEIF |
| 2374 | RQLsSGVSEI | 2483 | RRGsGPEIFT |
| 2378 | RQPsEEEII | 2485 | RRGsLLGSM |
| 2379 | RQPsEEEIIKL | 2489 | RRGsYPFIDF |
| 2383 | RQSsFEPEF | 2490 | RRHsASNLHAL |
| 2391 | RRAsIITKY | 2492 | RRIDIsPSTF |
| 2392 | RRAsLSEIGF | 2500 | RRIsDPEVF |
| 2395 | RRAsLSYSF | 2501 | RRIsDPQVF |
| 2409 | RRDsIVAEL | 2514 | RRIsIGSLF |
| 2412 | RRDsLQKPGL | 2516 | RRIsQIQQL |
| 2413 | RRFsDFLGLRR | 2517 | RRIsVFKYV |
| | FsGTAVY | | |
| 2433 | RRFsIATLR | 2534 | RRKsQVAEL |
| 2434 | RRFsLSPSL | 2544 | RRLsAARLL |
| 2435 | RRFsLTTLR | 2547 | RRLsADIRL |
| 2436 | RRFsLTTLRNF | 2552 | RRLsELLRY |
| 2437 | RRFsLTTLRNY | 2560 | RRLsFLVSY |
| 2446 | RRFsPPRRM | 2561 | RRLsFQAEY |
| 2451 | RRFsRSDEL | 3975 | RRLsFSTRL |
| 2455 | RRFSRsPIR | 2562 | RRLsGELISM |
| 2459 | RRFsRsPIRR | 2568 | RRLsGGSHSY |
| 2465 | RRFsSYSQM | 2575 | RRLsLFLNV |
| 2466 | RRFsTEYEL | 2576 | RRLsLFLVL |
| 2466 | RRFStEYEL | 2577 | RRLsLPGLL |
| 2466 | RRFstEYEL | 2578 | RRLsLSRSL |
| 2468 | RRFsVSTLRNL | 2604 | RRLsRKL |
| 2469 | RRFsVSTLRNLGL | 2605 | RRLsRKLSL |
| 2470 | RRFsVSTLRNLGLG | 2607 | RRLsVEIYDKF |
| 2471 | RRFsVSTLRNLGLGK | 2613 | RRLsYVLFI |
| 2479 | RRGsFEVTL | 2619 | RRLtLHSVF |
| 2480 | RRGsFEVTLL | 2620 | RRMsFQKP |
| 2639 | RRMsVAEQVDY | 2621 | RRMsFSGIFR |
| 2640 | RRMsVGDRAG | 2627 | RRMsLLSVV |
| 2641 | RRNsAPVSV | 2780 | RRVsSNGIFDL |
| 2642 | RRNsFIGTPY | 2783 | RRVVQRSsL |
| 2645 | RRNsKIFLDL | 2787 | RRYsASTVDVIEM |
| 2646 | RRNsLLHGY | 2801 | RRYsLPLKSIYM |
| 2672 | RRPsIAPVL | 2808 | RRYsPPIQR |
| 2674 | RRPsLLSEF | 2820 | RSAsFSRKV |
| 2681 | RRPsLVHGY | 2821 | RSAsLAKL |
| 2684 | RRPsQPYMF | 2825 | RSAsPSSQGw |
| 2695 | RRPsYRKIL | 2826 | RSAsPTVPR |
| 2702 | RRPsYTLGM | 2830 | RSAsVGAEEY |
| 2711 | RRRsLERLL | 2841 | RSDsYVEL |
| 3976 | RRRsRVFDL | 2845 | RSEsKDRKL |
| 2713 | RRSsDIISL | 2850 | RSEsPPAEL |
| 2714 | RRSsFLQ | 2853 | RSEsTENQSY |
| 2715 | RRSsFLQVF | 3977 | RSFsPKSPLEL |
| 2728 | RRSsIPITV | 2865 | RSGsLERKV |
| 2730 | RRsSIQSTF | 3978 | RSHsLHYLF |
| 2730 | RRSsIQSTF | 2866 | RSHsPLRSK |
| 2730 | RRssIQSTF | 2867 | RSHsPMSNR |
| 2740 | RRSsLDAEIDSL | 2875 | RSIsTPTcL |
| 2743 | RRSsLLSLM | 2877 | RSKsATLLY |
| 2746 | RRsSQSWSL | 3979 | RSKsSImYF |
| 2746 | RRSsQSwSL | 2879 | RSKtPPKSY |
| 2746 | RRSsQSWSL | 2880 | RSLGsVQAPSY |
| 2771 | RRsSYLLAI | 2881 | RSLsASPAL |
| 2771 | RRSsYLLAI | 2883 | RSLsESYEL |
| 2771 | RRssYLLAI | 2886 | RSLsPGGAA |
| 2777 | RRVsIGVQL | 2894 | RSLsPLLF |
| 2778 | RRVsPLNL | 2898 | RSLsPSSNSAF |
| 2779 | RRVsPLNLSSVTP | 2899 | RSLsQELVGV |
| 2901 | RSLSsGESL | 2901 | RSLsRVRVL |
| 2901 | RSLssGESL | 2901 | RSLsSGESL |
| 2903 | RSLsTTNVF | 2965 | RSVsPVQDL |
| 2905 | RSLsVEIVY | 3982 | RSYsRLETL |
| 2907 | RSLsVPVDL | 2983 | RSYsRSFSR |
| 2913 | RSNsLVSTF | 2985 | RSYsYPRQK |
| 2916 | RsPEPDPYLSY | 2988 | RTAsFAVRK |
| 2917 | RSPsFNMQL | 2992 | RTAsLVSGL |
| 2918 | RSPsKPTLAY | 2994 | RTAsPPPPPK |
| 2922 | RsPTKSSLDY | 2998 | RTDsIGEKLGRY |
| 3980 | RSRsDNALHL | 3004 | RTDsRGVNL |
| 2928 | RSRsPLGFY | 3008 | RTEsDSGLKK |
| 2933 | RSRsPRPAL | 3022 | RTFsPTYGL |
| 2936 | RSRsRDRMY | 3023 | RTFsPTYGLLR |
| 2939 | RSRsYTPEY | 3027 | RTGsPALGL |
| 2943 | RSSPRTIsF | 3028 | RTHsLLLLL |
| 2944 | RSSQFGsLEF | 3030 | RTIsNPEVVMK |
| 2945 | RSSsAPLGL | 3031 | RTIsPPTLGTL |
| 2947 | RSSsFSDTL | 3032 | RTIsQSSSL |
| 2948 | RsSSFVLPKL | 3033 | RtISVILFL |
| 2948 | RSSSFVLPKL | 3033 | RTIsVILFL |
| 2948 | RSSSFVLPKL | 3033 | RtIsVILFL |
| 2948 | RsSSFVLPKL | 3983 | RTLHsPPLQL |
| 2948 | RSssFVLPKL | 3034 | RTLsHISEA |
| 2948 | RsssFVLPKL | 3038 | RTLsPSSGY |
| 2948 | RSSSFVLPKL | 3042 | RTNsPGFQK |
| 2954 | RSSsPLQL | 3046 | RTPsISFHH |
| 2959 | RSVsGFLHF | 3051 | RTPsPKSLPSYL |
| 2960 | RSVsLDSQM | 3052 | RTRsLPITI |
| 2961 | RSVsLDSQMGY | 3055 | RTRsLSSLREK |
| 2964 | RSVsPTFL | 3058 | RTRsPSPTL |
| 3981 | RSVsPTTEM | 3058 | RTsSFALNL |
| 3062 | RTSsPLFNK | 3058 | RTSSFALNL |
| 3063 | RTSsQRSTLTY | 3062 | RTssFALNL |
| 3065 | RTVsPELIL | 3163 | RYRsPEPDPYLSY |
| 3070 | RTYsGPMNKV | 3167 | SAGGsAEALLSDLH |
| 3071 | RTYsHGTYR | 3168 | SAGGsAEALLSDLHAF |
| 3072 | RTYsLGSAL | 3169 | SAIsPKSSL |
| 3984 | RVAsPKLVm | 3171 | SAKsPLPSY |
| 3079 | RVAsPSRKV | 3172 | SAMsPTHHL |
| 3080 | RVAsPTSGV | 3175 | SAYGGLTsPGLS |
| 3081 | RVAsPTSGVK | 3178 | sDDEKMPDLE |
| 3087 | RVDsPSHGL | 3180 | SDMPRAHsF |
| 3100 | RVKtPTSQSYR | 3182 | SDsPPRPQPAF |
| 3104 | RVKVDGPRSPsY | 3186 | SEAsPSREAI |
| 3109 | RVLsPLIIK | 3193 | SELsPGRSV |
| 3114 | RVPsKsLDL | 3197 | SESKsMPVL |
| 3114 | RVPsKSLDL | 3201 | SFDsGIAGL |
| 3114 | RVPSKsLDL | 3202 | SFDsGSVRL |
| 3119 | RVRKLPsTTL | 3202 | SFDsGsVRL |
| 3121 | RVRQsPLATR | 3202 | SFDSGsVRL |
| 3123 | RVRRsSFLNAK | 3210 | sGPEIFTF |
| 3123 | RVRRSSFLNAK | 3214 | SIDsPQKL |
| 3123 | RVRRSSFLNAK | 3216 | SIGsPVKVGK |
| 3129 | RVRsPTRSP | 3217 | sIISPDFSF |
| 3141 | RVVPsPLQF | 3217 | sIIsPDFSF |
| 3144 | RVVsPGIDL | 3217 | SIIsPNFSF |
| 3146 | RVWEDRPsSA | 3221 | SIMsPEIQL |
| 3146 | RVWEDRPSsA | 3222 | SIPsGYLEL |
| 3146 | RVWEDRPssA | 3226 | SISsMEVNV |
| 3154 | RVYsPYNHR | 3227 | SISStPPAV |
| 3159 | RYLGGsMDLSTF | 3985 | SISVQVNSIKFDsE |
| 3160 | RYPsNLQLF | 3240 | SLDsPSYVLY |
| 3162 | RYQtQPVTL | 3243 | sLEEPKQANGGAY |
| 3249 | SLFsPQNTL | 3245 | SLFGGsVKL |
| 3255 | SLHDIQLsL | 3247 | SLFsGDEENA |
| 3274 | SLNSsPVSK | 3357 | SPRGSGsSTSL |
| 3275 | SLQPRSHsV | 3358 | SPRLPRsPRL |
| 3276 | SLQsLETSV | 3363 | SPRRsRSISL |
| 3280 | SLSsLLVKL | 3366 | SPRsESGGL |
| 3284 | SLYDRPAsYS | 3375 | SPRsPGKPM |
| | MSSLSREV | | |
| 3298 | SMTRsPPRV | 3379 | SPRsPGRSL |
| 3303 | SPAsPKISL | 3992 | sPRsPGRSL |
| 3307 | SPDHSDHtL | 3993 | SPRsPQLSDF |
| 3308 | SPDsSQSSL | 3385 | SPRsPSTTYL |
| 3308 | SPDSsQSSL | 3389 | SPRsPVPTTL |
| 3308 | SPDssQSSL | 3391 | SPRtPPQRF |
| 3312 | SPEKAGRRsSL | 3404 | SPSsPSVRRQL |
| 3318 | SPFKRQLsL | 3408 | SPSTSRSGGsSRL |
| 3321 | SPFLSKRsL | 3421 | SQILRTPsL |
| 3321 | SPFLsKRSL | 3426 | SRHsGPFFTF |
| 3321 | SPFLsKRsL | 3428 | SRLsLRRSL |
| 3986 | SPFQSsPLSL | 3445 | SRSSSVLsL |
| 3986 | SPFQSSPLsL | 3471 | SSDsPPRPQPAF |
| 3324 | SPGLARKRsL | 3476 | SSDsPTNHFF |
| 3987 | SPGsPLHSL | 3485 | SSGRsPSKAVAAR |
| 3988 | SPGsPLVSm | 3489 | SSMKsPLYL |
| 3989 | SPHtPSTHF | 3490 | SSMsPLPQM |
| 3332 | sPHYFSPFRPY | 3493 | SsPEFFM |
| 3334 | sPIKVTL | 3497 | SSSGsPHLY |
| 3336 | SPKSGsPKSSSL | 3799 | SSSSSGsPHLY |
| 3337 | SPKsPGLKA | 3501 | SsVPGVRLL |
| 3990 | SPPNLtPKPL | 3506 | SSYPRPLtY |
| 3991 | SPRDsPAVSL | 3511 | STDsETLRY |
| 335 | SPRERsPAL | 3526 | STIAILNsV |
| 3356 | SPRGEASsL | 3531 | STKsTELLL |
| 3994 | STsSGRLLY | 3532 | STLLAsPMLK |
| 3536 | SVDISPTRL | 3534 | STPsGYLEL |
| 3538 | SVFRHFGsFQK | 3616 | TPAQPQRRsL |
| 3545 | SVKPRRTsL | 3627 | TPIsPGRASGM |
| 3995 | SVKsPEVQLL | 3630 | TPIsPLKTGV |
| 3546 | SVKsPVTVK | 3632 | TPKsPGASNF |
| 3548 | SVLPRALSL | 3633 | TPMKKHLsL |
| 3553 | SVMQsPLVGV | 3634 | TPPPPPDtPP |
| 3556 | SVRRsVLMK | 3640 | TPRsPPLGL |
| 3561 | SVsSLEVHF | 3642 | TPRsPPLGLI |
| 3561 | SVSSLEVHF | 3651 | TPSsREGTL |
| 3561 | SVssLEVHF | 3653 | TPVSPRLHV |
| 3561 | SVSSLEVHF | 3654 | tPVSPTASM |
| 3568 | sYIEHIFEI | 3657 | TRDsLLIHL |
| 3572 | sYQKVIELF | 3658 | TRKTPEsFL |
| 3573 | SYSFSSSsIGH | 3658 | TRKtPESFL |
| 3574 | SYSYSFSSSsIGH | 3658 | TRKtPEsFL |
| 3578 | TAIsPPLSV | 3670 | TSDsPPHNDI |
| 3579 | TAPLVPPLsPQY | 3674 | TsFADEL |
| 3580 | TASPVAVsL | 3676 | TSGPGSRISSSSF |
| 3586 | TEPLPEKTQEsL | 3678 | TSIsPSRHGAL |
| 3587 | TESsPGSRQIQLW | 3696 | TVFsPTLPAA |
| 3589 | THsLLLLL | 3703 | TVYsSEEAELLK |
| 3591 | TIRsPTTVL | 3703 | TVYSsEEAELLK |
| 3996 | TKSsPLKI | 3703 | TVYssEEAELLK |
| 3598 | TLAsPSVFKST | 3704 | TYEGIFKtL |
| 3600 | TLDsLDFARY | 3708 | VAKRLsL |
| 3602 | TLLAsPMLK | 3711 | VEKLPDsPAL |
| 3603 | TLLsPSSIKV | 3713 | VELsPARSW |
| 3604 | TLMERTVsL | 3720 | VLDsPASKK |
| 3607 | TMAsPGKDNY | 3723 | VLFSSPPQM |
| 3614 | TPAPSRTAsF | 3725 | VLIENVAsL |
| 3997 | VLVVDTPsI | 3734 | VLLsPVPEL |
| 3744 | VLYsPQMAL | 3741 | VLSDVIPsI |
| 3745 | VMDsPVHL | 3835 | YEGsPIKVTL |
| 3746 | VMFPGNSPSY | 3838 | YFsPFRPY |
| 3747 | VMFRtPLASV | 3840 | YGITsPISL |
| 3748 | VMIGsPKKV | 3841 | YHLSPRAFLHY |
| 3774 | VPRPERRSsL | 3843 | yIQSRF |
| 3774 | VPRPERRssL | 3858 | yLQSRYYRA |
| 3774 | VPRPERRsSL | 3865 | YPGGRRsSL |
| 3998 | VPRPStPSRL | 3868 | YPLsPAKVNQY |
| 3776 | VPRsPKHAHSSSL | 3869 | YPLsPTKISEY |
| 3784 | VPTsPKSSL | 3670 | YPLsPTKISQY |
| 3788 | VPVsPGQQL | 3889 | YQRPFsPSAY |
| 3801 | VsPFQEL | 3893 | YQRsFDEVEGV |
| 3803 | VSsPPPYTAY | 3894 | YQRsFDEVEGVF |
| 3804 | VSSSDsPPRPQPAF | 3900 | YRYsPQSFL |
| 3807 | VTQtPPYVKK | 3901 | YSDRsSGGSY |
| 3808 | VTtPNRLIY | 3902 | YSEsRSSLDY |
| | | | YSFsPSKSY |
| 3809 | VTtPTGYKY | 3905 | YSFSSSsIGH |
| 3811 | VVDsPGQEVL | 3909 | YSLsPRPSY |
| 3814 | VYIPMSPGAHHF | 3915 | YTDSESSAsL |
| 3815 | VYLPTHTsL | 3916 | YTsSRDAFGY |
| 3820 | VYTyIQSRF | 3916 | YTSsRDAFGY |
| 3999 | yAQPQTTTPLPAVSG | 3916 | YTSSRDAFGY |
| 3831 | YEFsPVKML | 3917 | YVDAETsL |
| 3832 | YEGsPIKV | 3918 | YVKLTPVsL |
| 3833 | YEGsPIKVT | 3919 | YVPDsPALL |
| | | 3920 | YVSsPDPQL |
| | | 4000 | yYPDPHsPFAV |

TABLE 7
Peptides of the Presently Disclosed
Subject Matter

| | |
|---|---|
| 1. | AAAsPLHML |
| 2. | AADGtPKHSF |
| 3. | AADsPSQNL |
| 4. | AADsPSQNLT |
| 5. | AADtPPLETL |
| 6. | AAEsPSFL |
| 7. | (AcS)AARESHPHGVKRSAsP |
| | DDDLG |
| 8. | AAsDTERDGLA |
| 9. | AASNFKsPVKTIR |
| 10. | AAsPGAPQM |
| 11. | ADLsPEREV |
| 12. | ADsGEGDFLAEGGGVR |
| 13. | AEAPLPsPKL |
| 14. | AEAPPSKsP |
| 15. | AEDEIGtPRKF |
| 16. | AEDEIGtPRKY |
| 17. | AEEEIGtPRKF |
| 18. | AEEEIGtPRKW |
| 19. | AEEEIGtPRKY |
| 20. | AEFPSSGsNSVL |
| 21. | AEGsPPPKTY |
| 22. | AEIsPGSLP |
| 23. | AEIsPGSLPVTA |
| 24. | AEKsYQNSP |
| 25. | AELsPKNLL |
| 26. | AELsPSMAP |
| 27. | AELsPTTLSP |
| 28. | AELsPVEQKL |
| 29. | AEMPTQMsP |
| 30. | AENARSAsF |
| 31. | AENsPTRQQF |
| 32. | AENsPTRQQW |
| 33. | AENsPTRQQY |
| 34. | AENsSSREL |
| 35. | AEPtPEKEKRF |
| 36. | AEQGsPRVSY |
| 37. | AERtPELVEL |
| 38. | AEsPERVLL |
| 39. | AESsPTAGKKF |
| 40. | AESsPTAGKKL |
| 41. | AESsPTAGKKW |
| 42. | AESsPTAGKKY |
| 43. | AFsPVRSV |
| 44. | AGDsPGSQF |
| 45. | AILsPAFKV |
| 46. | AIMRsPQMV |
| 47. | AIsDLQQL |
| 48. | AKLsETIS |
| 49. | ALAAPsPPR |
| 50. | ALAAsPHAV |
| 51. | ALDsGASLLHL |
| 52. | ALDsGASLLHV |
| 53. | ALDsPPPPTL |
| 54. | ALDsQVPKV |
| 55. | ALGNtPPFL |
| 56. | ALGsRESLATI |
| 57. | ALGsRESLATL |
| 58. | ALGsRESLATV |
| 59. | ALIHQsLGL |
| 60. | ALIHQsLGV |
| 61. | ALLDIIRsL |
| 62. | ALLGSKsPDPYRL |
| 63. | ALLGSKsPDPYRV |
| 64. | ALLsLLKRV |
| 65. | ALMGsPQLV |
| 66. | ALMGsPQLVAA |
| 67. | ALRSSPIMRK |
| 68. | ALRSsPIMRY |
| 69. | ALSSLIHAL |
| 70. | ALStPVVEK |
| 71. | ALTsELANA |
| 72. | ALTtSAHSV |
| 73. | ALTTsAHSV |
| 74. | ALTtsAHSV |
| 75. | ALVSPPALHNA |
| 76. | ALVSPPALHNV |
| 77. | ALYsGVHKK |
| 78. | ALYsGVHKY |
| 79. | ALYsPAQPSL |
| 80. | ALYsPAQPSV |
| 81. | ALYtPQAPK |
| 82. | ALYtPQAPY |
| 83. | AMAAsPHAV |
| 84. | AMDsGASLLHL |
| 85. | AMDsGASLLHV |
| 86. | AMDsPLLKY |
| 87. | AMGAGHFsV |
| 88. | AMGsRESLATI |
| 89. | AMGsRESLATV |
| 90. | AMLGSKsPDPYRL |
| 91. | AMLGSKsPDPYRV |
| 92. | AMPGsPVEV |
| 93. | AMRSSPIMRK |
| 94. | AMVSPPALHNA |
| 95. | AMVSPPALHNV |
| 96. | AMYsGVHKK |
| 97. | APAGGsPRML |
| 98. | APAsPFRQL |
| 99. | APAsPFRQLL |
| 100. | APAsPLRPL |
| 101. | APAsPNHAGVL |
| 102. | APAsPRLL |
| 103. | APAsPTHPGL |
| 104. | APAsPTHPGLM |
| 105. | APDsPRAFL |
| 106. | APDsPSKQL |
| 107. | APGPGFSSRsL |
| 108. | APKsPSQDVKA |
| 109. | APLARASsL |
| 110. | APPAYEKLs |
| 111. | APPAYEKLsAEQ |
| 112. | APPAYEKLsAEQSPP |
| 113. | APPAYEKLsAEQSPPP |
| 114. | APPAYEKLsAEQSPPPY |
| 115. | APPPLVPAPRPSsPPRGPGPA |
| | RADR |
| 116. | APPsTSAAAL; |
| | APPStSAAAL; |
| | APPSTsAAAL; APPstSAAAL; |
| | APPStsAAAL; APPsTsAAAL |
| 117. | APRAPSASPLAL |
| 118. | APRDRRAVsF |
| 119. | APRGnVTSL |
| 120. | APRKGsFSAL |
| 121. | APRKGsFSALF |
| 122. | APRKGsFSALL |
| 123. | APRKGsFSALM |
| 124. | APRKGsFSALV |
| 125. | APRNGsGVAL |
| 126. | APRRYsSSF |
| 127. | APRRYsSSL |
| 128. | APRRYsSSM |
| 129. | APRRYsSSV |
| 130. | APRSPPPSRF |
| 131. | APRSPPPSRL |
| 132. | APRSPPPSRM |
| 133. | APRsPPPSRP |
| 134. | APRsPPPSRV |
| 135. | APRINGVAM |
| 136. | APRtPPGVTF |
| 137. | APSLFHLNtL |
| 138. | APSRQIsL |
| 139. | APSSARAsPLL |
| 140. | APSTYAHLsPAK |
| 141. | APSTYAHLsPAKTPPPP |
| 142. | APSVRSLsL |
| 143. | APSVRsLSL |
| 144. | APTsAAAL |
| 145. | APTsASNVM |
| 146. | APTSAsNVM |
| 147. | APVsASASV |
| 148. | APVsPLKF |
| 149. | APVsPRPGL |
| 150. | APVsPSSQKL |
| 151. | APVsSKSSL |
| 152. | APYRGQLAsPSSQ |
| 153. | AQDsPTHL |
| 154. | ARAsPRLHFL |
| 155. | ARFsGFYSM; ARFSGFYsM |
| 156. | ARFsPDDKYSF |
| 157. | ARFsPDDKYSK |
| 158. | ARFSPDDKYSL |
| 159. | ARFSPDDKYSM |
| 160. | ARFSPDDKYSR |
| 161. | ARFsPDDKYSY |
| 162. | ARFsPKVSL |
| 163. | ARGsLRRLL |
| 164. | ARIsRSISL |
| 165. | ARIsRSIsL |
| 166. | ARtsPINLGL |
| 167. | ARVsPSTSY |
| 168. | ASDEIGtPRKF |
| 169. | ASDEIGTPRKY |
| 170. | ASEsPSSLIFY; |
| | ASESPsSLIFY; |
| | ASESPSsLIFY; |
| | ASEsPsSLIFY; ASEsPSsLIFY; |
| | ASESPssLIFY |
| 171. | ASEsPssLIFY |
| 172. | ASEEIGtPRKF |
| 173. | ASEEIGTPRKY |
| 174. | ASEsPssLIFY |
| 175. | asGVAVSDGVIK |
| 176. | ASISRLsGEQVDGKG; |
| | AsISRLSGEQVDGKG; |
| | AsISRLsGEQVDGKG; |
| | AsIsRLSGEQVDGKGQ |
| 177. | ASKAsPTLDFTER |
| 178. | ASKMTQPQSKSAFPLSRKN |
| | KGsGsLDG |
| 179. | AsLGFVF |
| 180. | ASLsPSVSK |
| 181. | ASLsRPLNY |
| 182. | ASMsPGHPTHL |
| 183. | AsPTIEAQGTSPAHDN |
| 184. | AsPTIEAQGTSPAHDNI |
| 185. | AsPTIEAQGTSPAHDNIA |
| 186. | ASsPPDRIDIF |
| 187. | ASSsPVTLR |
| 188. | ASSsQIIHI |
| 189. | AtAGPRLGF |
| 190. | AtAGPRLGW; AtAGPRLGw |
| 191. | AtAGPRLGY |
| 192. | ATDEIGtPRKF |
| 193. | ATDEIGTPRKY |
| 194. | ATEEIGtPRKF |
| 195. | ATEEIGtPRKY |
| 196. | ATIPRPFsV |
| 197. | ATMKRMLsL |
| 198. | ATWsGSEFEV |
| 199. | ATYtPQAPK |
| 200. | ATYtPQAPKY |
| 201. | AVIHQsLGL |
| 202. | AVILPPLsPYFK |
| 203. | AVRPTRLsL |
| 204. | AVVsPPALHNA |
| 205. | AVVsPPALHNV |
| 206. | AyAQPQTTTPLPAVSG |
| 207. | AYEKLsAEQSPP |
| 208. | AYGGLTsPGLSY |
| 209. | DAKKsPLAL |
| 210. | DDDWTHLSSKEVDP |
| 211. | DDDWTHLsSKEVDPS |
| 212. | DDDWTHLsSKEVDPST |
| 213. | DDDWTHLsSKEVDPSTG |
| 214. | DDWTHLsSKEVDPS |
| 215. | DEFERIKtF |
| 216. | DEFERIKtW |
| 217. | DEFERIKtY |
| 218. | DEGPGHHHKPGLGEGtP |
| 219. | DEISHRAsF |
| 220. | DEISHRAsW |
| 221. | DEISHRAsY |
| 222. | DERLRINs |
| 223. | DERLRINsF |
| 224. | DERLRINsL |
| 225. | DERLRINsW |
| 226. | DERLRINsY |
| 227. | DETERAYsF |
| 228. | DGRRtFPRI |
| 229. | DKLsVIAEDSESGKQ |
| 230. | DKLsVIAEDSESGKQN |
| 231. | DKLsVIAEDSESGKQNP |
| 232. | DKLsVIAEDSESGKQNPG |
| 233. | DKLsVIAEDSESGKQNPGDS |
| 234. | DLKRRsMSI |
| 235. | DLKSSKAsL |
| 236. | DLRQAHsL |
| 237. | DLRtVEKEL |
| 238. | DLsEEKFL |
| 239. | DLsEEKFV |
| 240. | DLVPLsPLKK |
| 241. | DLWKItKVMD |
| 242. | DMVPLsPLKK |
| 243. | DPLSVsPARW |
| 244. | DPTRRFFKVtPPPGSGPQ |
| 245. | DQFERIKtL |
| 246. | DQISHRAsL |
| 247. | DRKsPRVL |
| 248. | DRKsPSVSL |
| 249. | DRLGsRPSL |
| 250. | DRQRsPIAL |
| 251. | DRSSPPtTPL |
| 252. | DRSSPPTtPL |
| 253. | DRSSPPttPL |
| 254. | DSDPLsPLKY |
| 255. | DsFESIESY |
| 256. | DSLARILsF |
| 257. | DssEEK |
| 258. | DSsEEKF; DssEEKF |
| 259. | DSsEEKFL; DssEEKFL |
| 260. | DSsEEKFLR; DssEEKFLR |
| 261. | DSsEEKFV |
| 262. | DSVPLsPLKY |
| 263. | DSVsPSESL |
| 264. | DTDPLsPLKY |
| 265. | DTDsAIGSFRY |
| 266. | DTEPLsPLKY |
| 267. | DTIsPTLGF |
| 268. | DTVPLsPLKY |
| 269. | DVYSGtPTKV |
| 270. | DWTHLsSKEVDPS |
| 271. | DWTHLsSKEVDPSTG |
| 272. | DyMDGTMSQV; |
| | DYMDGtMSQV; |
| | DYMDGTMsQV; |
| | DyMDGtMSQV; |
| | DyMDGTMsQV; |
| | DYMDGtMsQV; |
| | DyMDGtMsQV |
| 273. | DYSPYFKtI |
| 274. | EASsVTREL |
| 275. | EEAPQtPVAF |
| 276. | EEFsPRQAQMF |
| 277. | EEGsPTMVEKGLEPGVFTL |
| 278. | EEIGtPRKF |
| 279. | EELsPLALGRF |
| 280. | EELsPTAKF |
| 281. | EEMPENALPsDEDDKDPND |
| | PYRAL |
| 282. | EEQsFLQKF |
| 283. | EERRsPPAP |
| 284. | EERsPSWISA |
| 285. | EEsSDDGKKF; |
| | EESsDDGKKF |
| 286. | EEsSDDGKKW; |
| | EESsDDGKKW |
| 287. | EEsSDDGKKY; |
| | EESsDDGKKY |
| 288. | EGEEPTVYsDEEEPKDESAR |
| | KND |
| 289. | EGsPTMVEKGLEPGVFTL |
| 290. | EHVPSSSsI |
| 291. | EILNRsPRNR |
| 292. | ELFSsPPAV |
| 293. | ELKKsPTSLK |
| 294. | ELKKsPTSLY |
| 295. | ELLMPHRISSHF |
| 296. | ELLMPHRISSHFL |
| 297. | ELLPRRNsL |
| 298. | ELRISGsVQL |
| 299. | EMKKsPTSLK |
| 300. | EPAsPAAsISRLsGEQVDGKG |
| 301. | EPKRRsARF |
| 302. | EPKRRsARL |
| 303. | EPKRRsARM |
| 304. | EPKRRsARV |
| 305. | EPRNSLPAsPAHQL |
| 306. | EPRsPSHSF |
| 307. | EPRsPSHSL |
| 308. | EPRsPSHSM |
| 309. | EPRsPSHSV |
| 310. | EPsSTVVSL; EPSsTVVSL; |
| | EPSStVVSL |
| 311. | ERLKIRGsL |
| 312. | ERsPLLSQETAGQKP |
| 313. | ERsPLLSQETAGQKPL |
| 314. | ERVDSLVsL |
| 315. | ESDsLPRY |
| 316. | ESEsLPRY |
| 317. | ESsVRSQEDQLSR |
| 318. | ESsVRSQEDQLSRR |
| 319. | ETDsLPRY |
| 320. | ETEsLPRY |
| 321. | FAFPGStNSL; FAFPGSTNsL |
| 322. | FAFPGStNsL |
| 323. | FASPTsPPVL |
| 324. | FATIRTAsL |
| 325. | FAVsPIPGRGGVL |
| 326. | FAYGSGNsL |
| 327. | FAYsPGGAHGM |
| 328. | FAYsPGGAHGML |
| 329. | FDKHTLGDsDNES |
| 330. | FEDDDsNEKL |
| 331. | FGINsPQAL |
| 332. | FGLARAFsL |
| 333. | FGRKPsL |
| 334. | FGYDsPHDL |
| 335. | FIEsPSKL |
| 336. | FIEsPSKY |
| 337. | FIGsPTTPAGL |
| 338. | FKLSGLsF |
| 339. | FKMPQEKsPGYS |
| 340. | FKsPVKTIR |
| 341. | FKtQPVTF |
| 342. | FLDNsFEKV |
| 343. | FLDRPPtPLFI |
| 344. | FLDsAYFRL |
| 345. | FLDsLRDLI |
| 346. | FLDtPIAKV |
| 347. | FLFDKPVsPLLL |
| 348. | FLGVRPKsA |
| 349. | FLIIRtVLQL |
| 350. | FLITGGGKGsGFSL |
| 351. | FLLsPSDQEM |
| 352. | FLLsQNFDDE |
| 353. | FLMsDRSLHL |
| 354. | FLPSPDYFPSV |
| 355. | FLsRSIPSL |
| 356. | FLYsGKETK |
| 357. | FLYsGKETY |
| 358. | FPAsPSVSL |
| 359. | FPHsLLSVF |
| 360. | FPHsLLSVI |
| 361. | FPHsLLSVL |
| 362. | FPHsLLSVM |
| 363. | FPHsLLSVV |
| 364. | FPIsPVRF |
| 365. | FPIsPVRL |
| 366. | FPIsPVRM |
| 367. | FPIsPVRV |
| 368. | FPLARQFsL |
| 369. | FPLDsPKTLVL |
| 370. | FPLsPLRKY |
| 371. | FPLsPTKLSQY |
| 372. | FPRAsPRAL |
| 373. | FPRRHsVTL |
| 374. | FPRsPTKSSF |
| 375. | FPRsPTKSSL |
| 376. | FPRsPTKSSLDF |
| 377. | FPRsPTKSSLDL |
| 378. | FPRsPTKSSLDM |
| 379. | FPRsPTKSSLDV |
| 380. | FPRsPTKSSM |
| 381. | FPRsPTKSSV |
| 382. | FQYSKSPsL |
| 383. | FRFPsGAEL |
| 384. | FRFsGRTEY |
| 385. | FRGRYRsPY |
| 386. | FRKsMVEHY |
| 387. | FRRsPTKSSF |
| 388. | FRRsPTKSSL; FRRSPTKSSL |
| 389. | FRRsPTKSSLD |
| 390. | FRRsPTKSSLDF |
| 391. | FRRsPTKSSLDL |
| 392. | FRRsPTKSSLDM |
| 393. | FRRsPTKSSLD V |
| 394. | FRRsPTKSSLD Y |
| 395. | FRRsPTKSSM |
| 396. | FRRsPTKSSV |
| 397. | FRYsGKTEF |
| 398. | FRYsGKTEK |
| 399. | FRYSGKTEL |
| 400. | FRYSGKTEM |
| 401. | FRYsGKTER |
| 402. | FRYsGKTEY |
| 403. | FRYsGRTQA |
| 404. | FSDsHEGFSY |
| 405. | FSEsHEGFSY |
| 406. | FSEsPSKLw |
| 407. | FSEsPSKY |
| 408. | FsFAGFPSA |
| 409. | FsFKKSF |
| 410. | FSFKKsFKL |
| 411. | FsFKKSFKLS |
| 412. | FSIsPVRF |
| 413. | FSIsPVRL |
| 414. | FSIsPVRM |
| 415. | FSIsPVRV |
| 416. | FsSSHEGFSY; FSsSHEGFSY; |
| | FSSsHEGFSY; FssSHEGFSY; |
| | FsSsHEGFSY; FSSSHEGFSY |
| 417. | FSSsHEGFSY |
| 418. | FSVAsPLTL |
| 419. | FSVsPASTL |
| 420. | FSYsPRLPL |
| 421. | FTDsHEGFSY |
| 422. | FTDVNsILRY |
| 423. | FTEsHEGFSY |
| 424. | FTEsPSKL |
| 425. | FTEsPSKY |
| 426. | FTKsPYQEF |
| 427. | FTsSHEGFSY |
| 428. | FVsEGDGGRL |
| 429. | FVSKVMIGSPKKV |
| 430. | FVTtPTAEL |
| 431. | GALsPSLLHSL |
| 432. | GAQPGRHsF |
| 433. | GAQPGRHsL |
| 434. | GAQPGRHsV |
| 435. | GARTPSPsL |
| 436. | GATTTAPsL |
| 437. | GAVsPVGEL |
| 438. | GDDDWTHLSSKEVD |
| 439. | GDDDWTHLSSKEVDP |
| 440. | GDDDWTHLSSKEVDPS |
| 441. | GDDDWTHLSSKEVDPST |
| 442. | GDDDWTHLSSKEVDPSTG |
| 443. | GDEGPGHHHKPGLGEGtP |
| 444. | GEAsPLSSL |
| 445. | GEAsPSHII |
| 446. | GEEsSDDGKKF |
| 447. | GEEsSDDGKKW |
| 448. | GEEsSDDGKKY; |
| | GEEsSDDGKKY |
| 449. | GEFGGFGsV |
| 450. | GEIsPQREV |
| 451. | GEIsPTQIL |
| 452. | GEKsPPYGVP |
| 453. | GELPsPGKV |
| 454. | GELPTsPLHLL |
| 455. | GEMsPQRFFF |
| 456. | GENsGIGKLF |
| 457. | GEPHsSPEL |
| 458. | GEQsPNVSL |
| 459. | GERsPLLSQETAGQKP |
| 460. | GERsPLLSQETAGQKPL |
| 461. | GERsPPRIL |
| 462. | GETsLMRTL |
| 463. | GETsPHTFQL |
| 464. | GETsPRTKI |
| 465. | GETsPRTKITW |
| 466. | GETsYIRVY |
| 467. | GGDDDWTHLsSKEVDPS |
| 468. | GGDDDWTHLsSKEVDPSTG |
| 469. | GGDsPVRL |
| 470. | GGLTsPGLSY |
| 471. | GGPHFsPEHKEL |
| 472. | GGSFGGRSSGsP |
| 473. | GGSFGGRSSGsV |
| 474. | GHGsPFPSL |
| 475. | GHHHKPGLGEGtP |
| 476. | GHSKtILcM |
| 477. | GIDsPSSSV |
| 478. | GIFPGtPLKK |
| 479. | GIMsPLAKK |
| 480. | GKGGSYSQAASSDsAQG |
| 481. | GLAPNtPGKA |
| 482. | GLAPtPPSM |
| 483. | GLAsPTAITPV |
| 484. | GLDsGFHSV |
| 485. | GLDsLDQVEI |
| 486. | GLGELLRsL |
| 487. | GLIRSRsFIFK |
| 488. | GLIRSRsFIFY |
| 489. | GLIsPELRHL |
| 490. | GLIsPNVQL |
| 491. | GLIsPVWGA |
| 492. | GLItPGGFSSV |
| 493. | GLLDsPTSI |
| 494. | GLLGsPARL |
| 495. | GLLGsPVRA |
| 496. | GLLsPARLYAI |
| 497. | GLLsPARLYAV |
| 498. | GLLsPRFVDV |
| 499. | GLLsPRHSL |
| 500. | GLSFGGRSSGsP |
| 501. | GLSFGGRSSGsV |
| 502. | GLSsLAEEAA |
| 503. | GLSsLSIHL |
| 504. | GLTsPGLSY |
| 505. | GLTsPGLSYS |
| 506. | GLTsPGLSYSL |
| 507. | GMLGsPVRV |
| 508. | GMLsPARLYAI |
| 509. | GMLsPARLYAV |
| 510. | GMLsPGKSIEV |
| 511. | GPGHHHKPGLGEGtP |
| 512. | GPKPLFRRMsS |
| 513. | GPKPLFRRMSSL |
| 514. | GPKPLFRRMSSLV |
| 515. | GPKPLFRRMsSL VG |
| 516. | GPKPLFRRMSSL VGP |
| 517. | GPKPLFRRMsSL VGPT |
| 518. | GPKPLFRRMsSL VGPTQ |
| 519. | GPKPLFRRMsSL VGPTQS |
| 520. | GPLSRVKsL |
| 521. | GPLVRQIsL |
| 522. | GPPYQRRGsL |
| 523. | GPQPGRHsF |
| 524. | GPQPGRHsL |
| 525. | GPQPGRHsV |
| 526. | GPRAPsPTKPL |
| 527. | GPRASsLLsL |
| 528. | GPRPGsPSAF |
| 529. | GPRPGsPSAL |
| 530. | GPRPGsPSALL |
| 531. | GPRPGsPSAM |
| 532. | GPRPGsPSAV |
| 533. | GPRSAsLL |
| 534. | GPRSAsLLsF; GPRSASLLsF; |
| | GPRsASLLSF |
| 535. | GPRSASLLsL; GPRSAsLLSL; |
| | GPRSAsLLsL; GPRsAsLLSL; |
| | GPRsASLLSL |
| 536. | GPRSAsLLsM; GPRsASLLSM |
| 537. | GPRSAsLLsV; GPRSASLLsV; |
| | GPRsASLLSV |
| 538. | GPRsPKAPP |
| 539. | GPRsPPVTL |
| 540. | GPsSPWTQL; GPSsPWTQL; |
| | GPssPWTQL |
| 541. | GQLsPGVQF |
| 542. | GRKsPPPSF |
| 543. | GRKsPPPSK |
| 544. | GRKSPPPSL |
| 545. | GRKSPPPSM |
| 546. | GRKsPPPSR |
| 547. | GRKsPPPSY |
| 548. | GRLGsPHRF |
| 549. | GRLGsPHRK |
| 550. | GRLGSPHRL |
| 551. | GRLGSPHRM |
| 552. | GRLGsPHRR |
| 553. | GRLGsPHRY |
| 554. | GRLsPAYSL |
| 555. | GRLsPKASQVF |
| 556. | GRLsPKASQVK |
| 557. | GRLSPKASQVL |
| 558. | GRLSPKASQVM |
| 559. | GRLsPKASQVR |
| 560. | GRLsPKASQVY |
| 561. | GRLsPVPVPF |
| 562. | GRLsPVPVPK |
| 563. | GRLSPVPVPL |
| 564. | GRLSPVPVPM |
| 565. | GRLSPVPVPR |
| 566. | GRLSPVPVPY |
| 567. | GRQsPSFKL |
| 568. | GRsSPPPGY |
| 569. | GRSsTASLVKF |
| 570. | GRSSTASLVKK |
| 571. | GRSsTASLVKKK |
| 572. | GRSSTASLVKL |
| 573. | GRSSTASLVKM |
| 574. | GRSSTASLVKR |
| 575. | GRSsTASLVKR |
| 576. | GRSsTASLVKY |
| 577. | GSALGGGGAGLSGRASGGA |
| | QsPLRYLHV |
| 578. | GSDsPRSSL |
| 579. | GSDsSDDGKKY |
| 580. | GSDVsLTAcKV |
| 581. | GSEsSDDGKKY |
| 582. | GsGPEIFTF |
| 583. | GSKsPISQL |
| 584. | GsPHYFSPF |
| 585. | GSPHYFSPFRP |
| 586. | GSPHYFSPFRPY |
| 587. | GsPIKVTL |
| 588. | GsPIKVTLA |
| 589. | GsPTMVEKGLEPGVFTL |
| 590. | GsQLAVMMYL |
| 591. | GTDsSDDGKKY |
| 592. | GTEsSDDGKKY |
| 593. | GTFPKALsI |
| 594. | GTIRSRsFIFK |
| 595. | GTIRSRsFIFY |
| 596. | GTIsPTSSL |
| 597. | GtLPKY |
| 598. | GtLRRSDSQQAVK |
| 599. | GtLRRSDSQQAVKS |
| 600. | GtLRRSDSQQAVKSPP |
| 601. | GtPLSQAIIHQY |
| 602. | GTVtPALKL |
| 603. | GTYVPSSPTRLAY |
| 604. | GVAsPTITV |
| 605. | GVIsPQELLK |
| 606. | GVIsPQELLKK |
| 607. | GVIsPRFDVQL |
| 608. | GVVsPTFEL |
| 609. | GYVQRNLSLVRG |
| 610. | HAVsPIAKY |
| 611. | HEFMsDTNL |
| 612. | HEKKAYsF |
| 613. | HERGsLASL |
| 614. | HHHKPGLGEGtP |
| 615. | HHKPGLGEGtP |
| 616. | HIPsPAKKV |
| 617. | HKGEIRGASTPFQFRAssP |
| 618. | HKPGLGEGtP |
| 619. | HLHsPQHKL |
| 620. | HLYtSLPSL; HLYTsLPSL; |
| | HLYtsLPSL |
| 621. | HPFHAtPNTY |
| 622. | HPKRSVsL |
| 623. | HPLtPLITY |
| 624. | HPMsTASQV |
| 625. | HPRPTsQDL |
| 626. | HPRsPNVL |
| 627. | HPRsPNVLSF |
| 628. | HPRsPNVLSL |
| 629. | HPRsPNVLSM |
| 630. | HPRsPNVLSV |
| 631. | HPRsPTPTF; HPRSPtPTF |
| 632. | HPRsPTPTL; HPRSPtPTL |
| 633. | HPRsPTPTM; HPRSPtPTM |
| 634. | HPRSPtPTV; HPsSPTPTV |
| 635. | HPsSSAAVL; HPSsSAAVL; |
| | HPSSsAAVL; HPSstAAVL; |
| | HPssTAAVL |
| 636. | HPsSTASTAL; HPSsTASTAL; |
| | HPSStASTAL |
| 637. | HPTtVASY |
| 638. | HPYsPLPGL |
| 639. | HQGKFLQtF |
| 640. | HRFsINGHFY |
| 641. | HRLsPVKGEF |
| 642. | HRLsPVKGEK |
| 643. | HRLsPVKGER |
| 644. | HRLsPVKGEY |
| 645. | HRNsMKVFL |
| 646. | HRNsNPVIAEF |
| 647. | HRNsNPVIAEK |
| 648. | HRNsNPVIAEL |
| 649. | HRNSNPVIAEM |
| 650. | HRNsNPVIAER |
| 651. | HRNsNPVIAEY |
| 652. | HRVsVILKL |
| 653. | HRYsTPHAF; HRYStPHAF; |
| | HRYstPHAF |
| 654. | HRYPTSIASLAF |
| 655. | HRYsTPHAF |
| 656. | HTAsPTGMMK |
| 657. | HTFsPSPKL |
| 658. | HTIsPLDL |
| 659. | HTIsPSFQL |
| 660. | HVSLItPTKR |
| 661. | HVYtPSTTK |
| 662. | HYSsLVRVL |
| 663. | HYSsRLGSAIF |
| 664. | IADDRQsL |
| 665. | IAKsPHSTV |
| 666. | IAQDHRSsL |
| 667. | IEKIyIMKADTVIVG |
| 668. | IGKMRYVsV |
| 669. | HEtPHKEI |
| 670. | IIEtPHKEY |
| 671. | IIHsLETKL |
| 672. | IIQsPSSTGLLK |
| 673. | IISsPLKGY |
| 674. | IISsPLTGK |
| 675. | ILDISEHtL |
| 676. | ILDRtPEKL |
| 677. | ILDRtPEKV |
| 678. | ILDsGIYRI |
| 679. | ILDsGIYRV |
| 680. | ILGPPPPsFHL |
| 681. | ILKPRRsL |
| 682. | ILKsPEIQRA |
| 683. | ILKsPEIQRV |
| 684. | ILQtPQFQM |
| 685. | ILQVsIPSL |
| 686. | ILYPRPKsL |
| 687. | IMDRtPEKL |
| 689. | IMDsGIYRI |
| 690. | IMDsGIYRV |
| 691. | IMKsPEIQRA |
| 692. | IMKsPEIQRV |
| 693. | INKERRSsL |
| 694. | IPAPPSSPL |
| 695. | IPHQRSsL |
| 696. | IPIsLHTSL |
| 697. | IPKSKFLAL |
| 698. | IPLSKIKtL |
| 699. | IPRPLSLIGSTL |
| 700. | IPRsPFKVKVL |
| 701. | IPRTPLSPSPM |
| 702. | IPSSPQKVAL |
| 703. | IPTsPTSKY |
| 704. | IPTsSVLSL |
| 705. | IPVsKPLSL |
| 706. | IPVSKPLsL |
| 707. | IPVsPHIY |
| 708. | IPVSSHNSL |
| 709. | IPVSSHNSL |
| 710. | IPYAPsGEIPK |
| 711. | IQFsPPFPGA |
| 712. | IRAsLTKHF |
| 713. | IRFGRKPs |
| 714. | IRFGRKPsL |
| 715. | IRGsKIRFL |
| 716. | IRKERPIsL |
| 717. | IRNsQTRKI |
| 718. | IRSsYIRVL |
| 719. | IRYSGHsL |
| 720. | ISDGtLKY |
| 721. | ISDGtPLKY |
| 722. | ISDSAHtDY |
| 723. | ISDsMHSLY |
| 724. | ISDtPHKEI |
| 725. | ISDtPHKEY |
| 726. | ISEGtLKY |
| 727. | ISEGtPLKY |
| 728. | ISESAHtDY |
| 729. | ISEsMHSLY |
| 730. | ISEtPHKEI |
| 731. | ISEtPHKEY |
| 732. | ISFSAHtDY |
| 733. | ISIDsPQKL |
| 734. | ISNsHPLSL |
| 735. | ISSsMHSLY |
| 736. | IStDRDPL |
| 737. | IStDRDPY |
| 738. | IsTSPSVAL |
| 739. | IStSPSVAL; ISTsPSVAL; |
| | IstSPSVAL; IsTsPSVAL; |
| | IStsPSVAL; IstsPSVAL |
| 740. | ISVsPLATSAL |
| 741. | ISVSRSTsF |
| 742. | ITDGtLKY |
| 743. | ITDGtPLKY |
| 744. | ITDLPDHLLsY |
| 745. | ITDSAHtDY |
| 746. | ITDsMHSLY |
| 747. | ITDtPHKEI |
| 748. | ITDtPHKEY |
| 749. | ITEGtLKY |
| 750. | ITEGtPLKY |
| 751. | ITESAHtDY |
| 752. | ITEsMHSLY |
| 753. | ITEtPHKEI |
| 754. | ITEtPHKEY |
| 755. | ITItPPDRY |
| 756. | ITQGtLKY |
| 757. | ITQGtPLKK |
| 758. | ITQGtPLKY |
| 759. | ITtDRDPL |
| 760. | ITtDRDPY |
| 761. | ITTsPITVRK |
| 762. | ITYMsPAKL |
| 763. | IVDsPEKL |
| 764. | IVLsDSEVIQL |
| 765. | IVRyHQL |
| 766. | IVSsLRLAY |
| 767. | IVtDRDPL |
| 768. | IVtDRDPY |
| 769. | IYQyIQSRF |
| 770. | IYRSQsPHYF |
| 771. | IYYKsMPNL |
| 772. | IYYQsPLSL |
| 773. | KADsLEVQQM |
| 774. | KADtVSKTEL |
| 775. | KAFsPVR |
| 776. | KAFsPVRS |
| 777. | KAFsPVRSV |
| 778. | KAFsPVRSV; kAFsPVRSV |
| 779. | KAFsPVRSVR |
| 780. | KAFsPVRSVRK |
| 781. | KAKsPAPGL |
| 782. | KAKsPAPGV |
| 783. | KAPsPPPLL |
| 784. | KAPsRQISL; KAPSRQIsL; |
| | KAPsRQIsL |
| 785. | KARsPGRAF |
| 786. | KARsPGRAL |
| 787. | KARsPGRAM |
| 788. | KARsPGRAV |
| 789. | KASPKRLsL |
| 790. | KAVsLFLCY |
| 791. | KAVSLFLCY; KAVsLFLcY |
| 792. | KEDsDEVHL |
| 793. | KEGEEPTVYsDEEEPKDESA |
| | RKND |
| 794. | KEKsPFRET |
| 795. | KEKTIHLtL |
| 796. | KELARQIsF |
| 797. | KELsPAGSI |
| 798. | KEMsPTRQF |
| 799. | KEMsPTRQL |
| 800. | KEMsPTRQW |
| 801. | KEMsPTRQY |
| 802. | KEQsPEPHL |
| 803. | KESsPLSSRKI |
| 804. | KEStLHLVL |
| 805. | KEtPDKVEL |
| 806. | KEVDPsTGELQSL; |
| | KEVDPStGELQSL; |
| | KEVDPstGELQSL; |
| | KEVDPSTGELQsL |
| 807. | KFLsPAQYLY |
| 808. | KFsPVRSV |
| 809. | KGFsGTFQL |
| 810. | KGIsSSSLKEK |
| 811. | KIAsEIAQL |
| 812. | KIDsPTKV |
| 813. | KIDsPTKVK |
| 814. | KIDsPTKVKK |
| 815. | KIEKIyIMKADTVIVG |
| 816. | KIEsLENLYL |
| 817. | KIFsGVFVK |
| 818. | KIFsGVFVKV |
| 819. | KIFsKQQGK |
| 820. | KIFsKQQGY |
| 821. | KIGsIIFQV |
| 822. | KIHtLELKL |
| 823. | KIIsIFSG |
| 824. | KIIsIFSGTEK |
| 825. | KIKsFEVVF |
| 826. | KIKsFVKVY |
| 827. | KIKsLEEIYL |
| 828. | KIMsPRKAL |
| 829. | KIMSSPLSK |
| 830. | KIMSSPLSK |
| 831. | KIMssPLSK |
| 832. | KIRPHIAtL |
| 833. | KIRSSPREAK |
| 834. | KIRSSPREAY |
| 835. | KIRTsPTFR |
| 836. | KIRTsPTFY |
| 837. | KIsSLEIKL |
| 838. | KISsLEIKL |
| 839. | KIssLEIKL |
| 840. | KLAsLEREASV |
| 841. | KLAsLLHQV |
| 842. | KLAsPEKLAGL |
| 843. | KLAsPELERL |
| 844. | KLAsPELERV |
| 845. | KLAsPSEVVQQV |
| 846. | KLDIVSSQKV |
| 847. | KLDsFLDMQV |
| 848. | KLDsPRVTV |
| 849. | KLDsPTKVKK |
| 850. | KLDsPTKVKY |
| 851. | KLFHGsLEEL |
| 852. | KLFPDtPLAL |
| 853. | KLFPDtPLAV |
| 854. | KLFsGTVRK |
| 855. | KLFsGVFVKV |
| 856. | KLFsKQQGK |
| 857. | KLFsKQQGY |
| 858. | KLFsPAHKK |
| 859. | KLFsPAHKY |
| 860. | KLFsPSKEAEL |
| 861. | KLFsPSKEAEV |
| 862. | KLHGsLARAGK |
| 863. | KLHGsLARAGY |
| 864. | KLHsLIGLGI |
| 865. | KLIDIVsSQKV |
| 866. | KLIDRTEsL |
| 867. | KLIDVsSQKV |
| 868. | KLIsSSSLKEK |
| 869. | KLIsSSSLKEY |
| 870. | KLKDRLPsI |
| 871. | KLKSNPDFLK |
| 872. | KLKsNPDFLKK |
| 873. | KLKsNPDFLKY |
| 874. | KLKsPAPGL |
| 875. | KLKsPAPGV |
| 876. | KLKsQEIFL |
| 877. | KLKSsPLIEKK |
| 878. | KLKSsPLIEKY |
| 879. | KLKtPLVAK |
| 880. | KLKtPLVAR |
| 881. | KLLDFGSLSNL |
| 882. | KLLDFGsLSNLQV; |
| | KLLDFGSLsNLQV |
| 883. | KLLQFYPsL |
| 884. | KLLQFYPsV |
| 885. | KLLsPSDEKL |
| 886. | KLLsPSNEKV |
| 887. | KLLSSAQRtL |
| 888. | KLLSSAQRtV |
| 889. | KLLsTEEMEL |
| 890. | KLLsTEEMEV |
| 891. | KLLsVERIK |
| 892. | KLLsYIQRL |
| 893. | KLLtPIKEK |
| 894. | KLLtPIKEY |
| 895. | KLMAPDIsL |
| 896. | KLMAPDIsV |
| 897. | KLMIDRTEsV |
| 898. | KLMsDVEDV |
| 899. | KLMsPKADV |
| 900. | KLMsPKADVKL |
| 901. | KLMsPKADVKV |
| 902. | KLPDsPALA |
| 903. | KLPDsPALAK |
| 904. | KLPDsPALAKK |
| 905. | KLPDsPALAKY |
| 906. | KLPDsPALAY |
| 907. | KLPsGSKKV |
| 908. | KLPsPAPARK |
| 909. | KLPTsPLKMK |
| 910. | KLPTsPLKMY |
| 911. | KLPTtPVKAK |
| 912. | KLPTtPVKAY |
| 913. | KLQEFLQtL |
| 914. | KLQVtSLSV |
| 915. | KLRsPFLQK |
| 916. | KLRsPFLQY |
| 917. | KLRsPKSEL |
| 918. | KLRSSPREAK |
| 919. | KLRTsPTFK |
| 920. | KLsGDQPAAR |
| 921. | KLSGLsF |
| 922. | KLSSLGNLK |
| 923. | KLSsLGNLKK |
| 924. | KLSSLGNLKY |
| 925. | KLSsPRGGMK |
| 926. | KLSsPRGGMKK |
| 927. | KLSsPRGGMKY |
| 928. | KLsVIAED SESGKQN |
| 929. | KLsVIAEDSESGKQNP |
| 930. | KLsVIAED SESGKQNPG |
| 931. | KLVSFHDDsDEDL |
| 932. | KLwtLVSEQTRV |
| 933. | KLYsEIDIKV |
| 934. | KLYsGNMEK |
| 935. | KLYsISSQV |
| 936. | KLYTyIQSR |
| 937. | KLYTyIQSRF |
| 938. | KMAsLARKV |
| 939. | KMAsLLHQV |
| 940. | KMAsPELERL |
| 941. | KMAsPELERV |
| 942. | KMDIVSSQKV |
| 943. | KMDsFLDMQL |
| 944. | KMDsFLDMQV |
| 945. | KMDsPRVTV |
| 946. | KMDsPTKVKK |
| 947. | KMFPDtPLAL |
| 948. | KMFPDtPLAV |
| 949. | KMFsGTVRK |
| 950. | KMFsGVFVKV |
| 951. | KMFsKQQGK |
| 952. | KMFsPAHKK |
| 953. | KMFsPSKEAEL |
| 954. | KMFsPSKEAEV |
| 955. | KMHGsLARAGK |
| 956. | KMIDIVsSQKV |
| 957. | KMIDRTEsL |
| 958. | KMIsSSSLKEK |
| 959. | KMKSNPDFLK |
| 960. | KMKsNPDFLKK |
| 961. | KMKsNPDFLKY |
| 962. | KMKSsPLIEKK |
| 963. | KMKtPLVAK |
| 964. | KMKtPLVAR |
| 965. | KMLDFGSLsNLQV |
| 966. | KMLQFYPsL |
| 967. | KMLsCAGADRL |
| 968. | KMLscAGADRL |
| 969. | KMLsPSNEKL |
| 970. | KMLsPSNEKV |
| 971. | KMLSSAQRtL |
| 972. | KMLSSAQRtV |
| 973. | KMLsVERIK |
| 974. | KMLtPIKEK |
| 975. | KMLtPRIEL |
| 976. | KMMAPDIsV |
| 977. | KMMsPKADVKL |
| 978. | KMMsPKADVKV |
| 979. | KMPTsPLKMK |
| 980. | KMPTtPVKAK |
| 981. | KMPTtPVKAY |
| 982. | KMRsPFLQK |
| 983. | KMRSSPREAK |
| 984. | KMRTsPTFK |
| 985. | KMSSLGNLK |
| 986. | KMSsLGNLKK |
| 987. | KMSsLGNLKY |
| 988. | KMSSPRGGMK |
| 989. | KMSsPRGGMKK |
| 990. | KMsSYAFFV |
| 991. | KMSsYAFFV |
| 992. | KMssYAFFV |
| 993. | KMVsMKPPGF |
| 994. | KMYsEIDIKV |
| 995. | KMYsGNMEK |
| 996. | KNRsWKYN |
| 997. | KNRsWKYNQ |
| 998. | KNRsWKYNQSISLR |
| 999. | KNRsWKYNQSISLRRP |
| 1000. | KPAsPARRF |
| 1001. | KPASPARRL |
| 1002. | KPAsPARRLDL |
| 1003. | KPAsPARRM |
| 1004. | KPAsPARRV |
| 1005. | KPAsPKFIVTF |
| 1006. | KPAsPKFIVTL |
| 1007. | KPAsPKFIVTM |
| 1008. | KPAsPKFIVTV |
| 1009. | KPAVSRsRSSSL |
| 1010. | KPEsRRSSLL |
| 1011. | KPFKLSGLsF |
| 1012. | KPGLGEGtP |
| 1013. | KPLIRSQsL |
| 1014. | KPMtPKVVTL |
| 1015. | KPPGtPPPSAL |
| 1016. | KPPHsPLVF |
| 1017. | KPPHsPLVL |
| 1018. | KPPHsPLVM |
| 1019. | KPPHsPLVV |
| 1020. | KPPsPEHQSF |
| 1021. | KPPsPEHQSL |
| 1022. | KPPsPEHQSM |
| 1023. | KPPsPEHQSV |
| 1024. | KPPsPGTVL |
| 1025. | KPPsPGTVLAL |
| 1026. | KPPsPSPIEF |
| 1027. | KPPsPSPIEM |
| 1028. | KPPsPSPIEV |
| 1029. | KPPtPGASF |
| 1030. | KPPtPGASL |
| 1031. | KPPPGASM |
| 1032. | KPPtPGASV |
| 1033. | KPPtSQSSVL; KPPTsQSSVL |
| 1034. | KPPVsFFSL |
| 1035. | KPPYRSHsF |
| 1036. | KPPYRSHsL |
| 1037. | KPPYRSHsM |
| 1038. | KPPYRSHsV |
| 1039. | KPQTRGKtF |
| 1040. | KPQTRGKtL |
| 1041. | KPQTRGKtM |
| 1042. | KPQTRGKtV |
| 1043. | KPRPLsMDL |
| 1044. | KPRPPPLsF |
| 1045. | KPRPPPLsL |
| 1046. | KPRPPPLsM |
| 1047. | KPRPPPLsP |
| 1048. | KPRPPPLsV |
| 1049. | KPRRFsRSL |
| 1050. | KPRsPDHVF |
| 1051. | KPRsPDHVL |
| 1052. | KPRsPDHVM |
| 1053. | KPRsPDHVV |
| 1054. | KPRsPFSKI |
| 1055. | KPRsPPRAF |
| 1056. | KPRsPPRAL |
| 1057. | KPRsPPRALF |
| 1058. | KPRsPPRALL |
| 1059. | KPRsPPRALM |
| 1060. | KPRsPPRALV |
| 1061. | KPRsPPRALVF |
| 1062. | KPRsPPRALVL |
| 1063. | KPRsPPRALVLF |
| 1064. | KPRsPPRALVLL |
| 1065. | KPRsPPRALVLM |
| 1066. | KPRsPPRALVLP |
| 1067. | KPRsPPRALVLV |
| 1068. | KPRsPPRALVM |
| 1069. | KPRsPPRALVV |
| 1070. | KPRsPPRAM |
| 1071. | KPRsPPRAV |
| 1072. | KPRsPVVEF |
| 1073. | KPRsPVVEL |
| 1074. | KPRsPVVEM |
| 1075. | KPRsPVVEV |
| 1076. | KPSsLRRVTI |
| 1077. | KPSsPRGSL |
| 1078. | KPSsPRGSLL |
| 1079. | KPTLYnVSL |
| 1080. | KPVsPKSGTL |
| 1081. | KPVsPLLL |
| 1082. | KPYsPLASF |
| 1083. | KPYsPLASL |
| 1084. | KPYsPLASM |
| 1085. | KPYsPLASV |
| 1086. | KQDsLVINL |
| 1087. | KQKsLTNLSF |
| 1088. | KQPsFSAKKM |
| 1089. | KQYsGKFF |
| 1090. | KRAsALLNL |
| 1091. | KRAsFAKSF |
| 1092. | KRAsFAKSK |
| 1093. | KRAsFAKSL |
| 1094. | KRASFAKSM |
| 1095. | KRAsFAKSR |
| 1096. | KRAsFAKSV |
| 1097. | KRAsFAKSY |
| 1098. | KRAsGQAFEF |
| 1099. | KRAsGQAFEK |
| 1100. | KRAsGQAFEL |
| 1101. | KRAsGQAFER |
| 1102. | KRAsGQAFEY |
| 1103. | KRAsRIYNT |
| 1104. | KRASsPFRF |
| 1105. | KRASsPFRK |
| 1106. | KRASsPFRL |
| 1107. | KRASSPFRM |
| 1108. | KRASsPFRR |
| 1109. | KRASsPFRY |
| 11I0. | KRAsVFVKF |
| 1111. | KRAVFVKK |
| 1112. | KRAsVFVKL |
| 1113. | KRASVFVKM |
| 1114. | KRAsVFVKR |
| 1115. | KRAsVFVKY |
| 1116. | KRAsYILRL |
| 1117. | KRFsFKF |
| 1118. | KRFsFKK |
| 1119. | KRFsFKKSF |
| 1120. | KRFsFKKsFKL; |
| | KRFsFKKsFKL |
| 1121. | KRFsFKKSK |
| 1122. | KRFsFKKSL |
| 1123. | KRFSFKKSM |
| 1124. | KRFsFKKSR |
| 1125. | KRFsFKKSY |
| 1126. | KRFsFKL |
| 1127. | KRFSFKM |
| 1128. | KRFsFKR |
| 1129. | KRFsFKY |
| 1130. | KRFsGTVRF |
| 1131. | KRFsGTVRK |
| 1132. | KRFsGTVRL |
| 1133. | KRFSGTVRM |
| 1134. | KRFsGTVRR |
| 1135. | KRFsGTVRY |
| 1136. | KRFsLDFNL |
| 1137. | KRIsIFLSM |
| 1138. | KRIsISTSGGSF |
| 1139. | KRIsRMRLV |
| 1140. | KRKsFTSLY |
| 1141. | KRLEKSPsF |
| 1142. | KRLEKsPSF |
| 1143. | KRLSPAPQF |
| 1144. | KRLSPAPQK |
| 1145. | KRLSPAPQL |
| 1146. | KRLSPAPQM |
| 1147. | KRLSPAPQR |
| 1148. | KRLSPAPQY |
| 1149. | KRLsTSPVRL |
| 1150. | KRLsVELTSSL |
| 1151. | KRLsVELTSSLF |
| 1152. | KRLsVERIF |
| 1153. | KRLsVERIK |
| 1154. | KRLSVERIL |
| 1155. | KRLSVERIM |
| 1156. | KRLsVERIR |
| 1157. | KRLsVERIY |
| 1158. | KRLsVERIYQK |
| 1159. | KRLtHVYDL |
| 1160. | KRMsNELENY |
| 1161. | EKRMsPKEF |
| 1162. | KRMsPKEK |
| 1163. | KRMsPKEL |
| 1164. | KRMsPKER |
| 1165. | KRMsPKEY |
| 1166. | KRMsPKPEL |
| 1167. | KRMsPKPF |
| 1168. | KRMsPKPK |
| 1169. | KRMsPKPL |
| 1170. | KRMSPKPM |
| 1171. | KRMSPKPR |
| 1172. | KRMSPKPR |
| 1173. | KRMsPKPY |
| 1174. | KRMsVTEGGIKY |
| 1175. | KRNsIKKIV |
| 1176. | KRNsRLGFL |
| 1177. | KRNtFVGTPF |
| 1178. | KRRtGALVL |
| 1179. | KRsPIFF |
| 1180. | KRsSISQLL; KRSsISQLL; |
| | KRssISQLL |
| 1181. | KRSsVHGVSF |
| 1182. | KRTsKYFSL |
| 1183. | KRWQsPVTK |
| 1184. | KRYsEPVSL |
| 1185. | KRYsGNMEF |
| 1186. | KRYsGNMEK |
| 1187. | KRYSGNMEL |
| 1188. | KRYsGNMEM |
| 1189. | KRYSGNMER |
| 1190. | KRYsGNMEY |
| 1191. | KRYsRALYL |
| 1192. | KRYsRSLTI |
| 1193. | KSDGsFIGY |
| 1194. | KSDsPAIQL |
| 1195. | KSDsPSTSSI |
| 1196. | KSDsRQERY |
| 1197. | KSGELLAtW |
| 1198. | KSKsMDLGI |
| 1199. | KSKsNPDFLKK |
| 1200. | KSKtPLVAK |
| 1201. | KSKtPLVAR |
| 1202. | KSKtPLVAY |
| 1203. | KSLsPSGLKI |
| 1204. | KSLsPSLLGY |
| 1205. | KsLVRLLLL |
| 1206. | KSPTsPLNM |
| 1207. | KSsIIIRM |
| 1208. | KsSSLDKQL; KSsSLDKQL; |
| | KSSsLDKQL; KsssLDKQL |
| 1209. | KSSsLGNLKK |
| 1210. | KsVKALSSLHGDDQ |
| 1211. | KsVKALSSLHGDDQD |
| 1212. | KSVKALSSLHGDDQDsEDE |
| 1213. | KSYsFIARMKA |
| 1214. | KSYsRSRsR |
| 1215. | KTDGsFIGY |
| 1216. | KTDsRQERY |
| 1217. | KTEsPRTSGVL |
| 1218. | KTEsRQERY |
| 1219. | KTFsIGKIAK |
| 1220. | KTIsLTDFL |
| 1221. | KTKsIAEEL |
| 1222. | KTKsMFFFL |
| 1223. | KTLsLVKEL |
| 1224. | KtLSPGKNGVVK |
| 1225. | KTMsGTFLL |
| 1226. | KTMsGTFLL |
| 1227. | KTMsPSQMIM |
| 1228. | KTPsHTRML |
| 1229. | KTPsLTRRI |
| 1230. | KTPTsPLKM |
| 1231. | KTPTsPLKMK |
| 1232. | KTPTsPLKMY |
| 1233. | KTQsLPVTEK |
| 1234. | KTRsLSVEI |
| 1235. | KTRsLSVEIVY; |
| | KTRSLsVEIVY; |
| | KTRsLsVEIVY |
| | KVYsssEFL |
| 1236. | KTVsEPNLKL |
| 1237. | KTRsLSVEIVY |
| 1238. | KTVsPSPAF |
| 1239. | KTWKGsIGL |
| 1240. | KVAsLLHQV |
| 1241. | KVDsPTVTTTL |
| 1242. | KVDsPVIF |
| 1243. | KVHGsLARAGK |
| 1244. | KVHGsLARAGY |
| 1245. | KVIPVTRsL |
| 1246. | KVKSsPLIEKK |
| 1247. | KVKSsPLIEKL |
| 1248. | KVKSsPLIEKY |
| 1249. | KVLsSLVTL; KVLSsLVTL; |
| | KVLssLVTL |
| 1250. | KVLsKEFHL |
| 1251. | KVLSPtAAK |
| 1252. | KVLsSLVTL |
| 1253. | KVLsTEEMEL; |
| | KVLStEEMEL |
| 1254. | KVLtPIKEK |
| 1255. | KVLsTEEMEL |
| 1256. | KVLtPIKEY |
| 1257. | KVPDsPALAK |
| 1258. | KVPDsPALAKK |
| 1259. | KVPDsPALAKY |
| 1260. | KVPDsPALAY |
| 1261. | KVPTsPLKMY |
| 1262. | KVQsLRRAL |
| 1263. | KVQVtSLSV |
| 1264. | KVYsSSEFL; KVYSsSEFL; |
| | KTRSLsVEIVY; |
| | KTRsLsVEIVY |
| | KVYsssEFL |
| 1236. | KTVsEPNLKL |
| 1237. | KTRsLSVEIVY |
| 1238. | KTVsPSPAF |
| 1239. | KTWKGsIGL |
| 1240. | KVAsLLHQV |
| 1241. | KVDsPTVTTTL |
| 1242. | KVDsPVIF |
| 1243. | KVHGsLARAGK |
| 1244. | KVHGsLARAGY |
| 1245. | KVIPVTRsL |
| 1246. | KVKSsPLIEKK |
| 1247. | KVKSsPLIEKL |
| 1248. | KVKSsPLIEKY |
| 1249. | KVLsSLVTL; KVLSsLVTL; |
| | KVLssLVTL |
| 1250. | KVLsKEFHL |
| 1251. | KVLSPtAAK |
| 1252. | KVLsSLVTL |
| 1253. | KVLsTEEMEL; |
| | KVLStEEMEL |
| 1254. | KVLtPIKEK |
| 1255. | KVLsTEEMEL |
| 1256. | KVLtPIKEY |
| 1257. | KVPDsPALAK |
| 1258. | KVPDsPALAKK |
| 1259. | KVPDsPALAKY |
| 1260. | KVPDsPALAY |
| 1261. | KVPTsPLKMY |
| 1262. | KVQsLRRAL |
| 1263. | KVQVtSLSV |
| 1264. | KVYsSSEFL; KVYSsSEFL; |
| | KVYSSsEFL; KVYssSEFL; |
| | KVYSssEFL; KVYsSsEFL; |
| 1265. | KVYtPSISK |
| 1266. | KYELsVIM |
| 1267. | KYIsGPHEL |
| 1268. | KYPDVAsPTL |
| 1269. | KYsPGKLRGN |
| 1270. | LADsPLKL |
| 1271. | LALTRSSSL |
| 1272. | LDEAGQRStM |
| 1273. | LEAPPsPSL |
| 1274. | LEItPPSSEKL |
| 1275. | LESPTtPLL; LESPttPLL; |
| | LESPTtPLL; LEsPTTPLL |
| 1276. | LGGGGAGLSGRASGGAQsP |
| | LRYLHV |
| 1277. | LIDNsFNRY |
| 1278. | LIMPRPNsV |
| 1279. | LKLsYLTWV |
| 1280. | LLARtPPAA |
| 1281. | LLASPGHISV |
| 1282. | LLDPSRSYsY |
| 1283. | LLDtPVKTQY |
| 1284. | LLFsPVTSL |
| 1285. | LLFsPVTSV |
| 1286. | LLLsEEVEL |
| 1287. | LLNKSSPVK |
| 1288. | LLNKSSPVKK |
| 1289. | LLNKSsPVKY |
| 1290. | LLNKtPPTA |
| 1291. | LMFsPVTSL |
| 1292. | LMFsPVTSV |
| 1293. | LMHsFILKA |
| 1294. | LMNKSSPVK |
| | LPLSSsHLNVY; |
| | LPLSSSHLNVY; |
| | LPLsSsHLNVY; |
| | LPLSssHLNVY; |
| | LPLsssHLNVY |
| 1295. | LMNKSsPVKK |
| 1296. | LMNKSsPVKY |
| 1297. | LPAFKRKtL |
| 1298. | LPAsPAGRL |
| 1299. | LPAsPAHQL |
| 1300. | LPAsPHQF |
| 1301. | LPASPHQL |
| 1302. | LPAsPHQM |
| 1303. | LPAsPHQV |
| 1304. | LPAsPRARF |
| 1305. | LPAsPRARL |
| 1306. | LPAsPRARLSA |
| 1307. | LPAsPRARM |
| 1308. | LPAsPRARV |
| 1309. | LPAsPSVSL |
| 1310. | LPAsPVARR |
| 1311. | LPDPGsPRL |
| 1312. | LPEsPRLTL |
| 1313. | LPIFSRLsF |
| 1314. | LPIFSRLsI |
| 1315. | LPIFSRLsL |
| 1316. | LPIFSRLsM |
| 1317. | LPIFSRLsV |
| 1318. | LPKARPMsL |
| 1319. | LPKGLSAsL |
| 1320. | LPKGLsASL |
| 1321. | LPKSPPYTAF |
| 1322. | LPKsPPYTAL |
| 1323. | LPKsPPYTAM |
| 1324. | LPKsPPYTAV |
| 1325. | LPLsPKETV |
| 1326. | LPLsSSHLNVY; |
| | LPLSSSHLNVY; |
| 1327. | LPNsIASRF |
| 1328. | LPRGSsPSVF |
| 1329. | LPRGSsPSVL |
| 1330. | LPRGSsPSVM |
| 1331. | LPRGSsPSW |
| 1332. | LPRMIsHSEL |
| 1333. | LPRNsTMM; LPRNStMM |
| 1334. | LPRPAsPAL |
| 1335. | LPRPLsPTKL |
| 1336. | LPRPLSPtKL; LPRPLsPtKL |
| 1337. | LPRsPRLGH |
| 1338. | LPRSSsMAA |
| 1339. | LPRSSsMAAGL |
| 1340. | LPRtPRPEL |
| 1341. | LPRtPSASSL; LPRTPsASSL; |
| | LPRtPsASSL |
| 1342. | LPRtPSYSI |
| 1343. | LPSESVSsL |
| 1344. | LPsPRGQRVI |
| 1345. | LPsPTATSQL |
| 1346. | LPSSGRSsL |
| 1347. | LPTsLPSSL |
| 1348. | LPTsPLAMEY |
| 1349. | LPVsPGHRKT |
| 1350. | LPVsPRLQL |
| 1351. | LPYPVsPKQKY |
| 1352. | LQHSFsFAGF |
| 1353. | LQIsPPLHQHL |
| 1354. | LQIsPVSSY |
| 1355. | LQIsPVSSYA |
| 1356. | LQLPsPTAT |
| 1357. | LQLsPLKGLSL |
| 1358. | LQNItENQL |
| 1359. | LSAsFRSLY |
| 1360. | LSAsPLTSL |
| 1361. | LSDDGKAsL |
| 1362. | LSDPSRSYsY |
| 1363. | LSDsDTEAKL |
| 1364. | LSDsDTEAKY |
| 1365. | LSDsPSMGRY |
| 1366. | LSDtPVKTQY |
| 1367. | LSEIKFNsY |
| 1368. | LSEPSRSYsY |
| 1369. | LSEsDTEAKL |
| 1370. | LSEsDTEAKY |
| 1371. | LSEtPVKTQY |
| 1372. | LSKFRMPQPSSGREsPRH |
| 1373. | LSKsEHSLF |
| 1374. | LSSsPPATHF |
| 1375. | LSSsVIREL |
| 1376. | LTDPSRSYsY |
| 1377. | LTDPSsPTIS |
| 1378. | LTDPSsPTISSY |
| 1379. | LTDsDTEAKL |
| 1380. | LTDsDTEAKY |
| 1381. | LTDtPVKTQY |
| 1382. | LTEPSRSYsY |
| 1383. | LTEsDTEAKL |
| 1384. | LTEsDTEAKY |
| 1385. | LTEtPVKTQY |
| 1386. | LTHsLVLHY |
| 1387. | LTKsPLAQM |
| 1388. | LTLsPKLQL |
| 1389. | LTSsRLLKL |
| 1390. | LTYRRRLsY |
| 1391. | LVAsPRLEK |
| 1392. | LVDsVAKTM |
| 1393. | LVVsPGQQTL |
| 1394. | LYTyIQSRF |
| 1395. | MLAEsPSVPRL |
| 1396. | MLAEsPSVPRV |
| 1397. | MLPsILNQL |
| 1398. | MLRsPPRVSK |
| 1399. | MMRsPPRVSK |
| 1400. | MPGSPTKTVY |
| 1400. | MPHsPTLRV |
| 1402. | MPKFRMPsL |
| 1403. | MPLsPDPSHTTL |
| 1404. | MPMRsPSKL |
| 1405. | MPNsPAPHF |
| 1406. | MPREPsATRL |
| 1407. | MPRPsIKKAQNSQAARQ |
| 1408. | MPRQPsATRF |
| 1409. | MPRQPsATRL |
| 1410. | MPRQPsATRM |
| 1411. | MPRQPsATRV |
| 1412. | MPsPATLSHSL |
| 1413. | MPsPGGRITL |
| 1414. | MPSPVsPKL |
| 1415. | MPVPtTPEF |
| 1416. | MPVPTtPEF |
| 1417. | MPVPttPEF |
| 1418. | MPVRPTtNTF |
| 1419. | MPVtSSSFF |
| 1420. | MRLsRELQF |
| 1421. | MRLSRELQK |
| 1422. | MRLsRELQL |
| 1423. | MRLSRELQM |
| 1424. | MRLsRELQR |
| 1425. | MRLsRELQY |
| 1426. | MSDtYRLKY |
| 1427. | MSEtYRLKY |
| 1428. | MTDtYRLKY |
| 1429. | MTEtYRLKY |
| 1430. | MTKSsPLKI |
| 1431. | MTKsSPLKI |
| 1432. | MTKssPLKI |
| 1433. | MTRsPPRVSK |
| 1434. | MTRsPPRVSY |
| 1435. | NAEsGRGQVM |
| 1436. | NAIsLPTI |
| 1437. | NEFHsPIGL |
| 1438. | NFKsPVKTIR |
| 1439. | NGIIRSQsF |
| 1440. | NIAsPGTVHKR |
| 1441. | NIPsFIVRL |
| 1442. | NLELSKFRMPQP |
| | SSGREsPRH |
| 1443. | NLGsRNHVHQL |
| 1444. | NLIsPVRNGAV |
| 1445. | NLLsPDGKMISV |
| 1446. | NLVERKNsK |
| 1447. | NLVERKNSK |
| 1448. | NLVERKNsL |
| 1449. | NMDsPGPML |
| 1450. | NMVERKNsK |
| 1451. | NMVERKNsL |
| 1452. | NPsSPEFFM; NPSsPEFFM; |
| | NPssPEFFM |
| 1453. | NPVsLPSL |
| 1454. | NRAMRRVSSVPSR |
| 1455. | NRAMRRVsSVPSRAQ |
| 1456. | NRFsPKASL |
| 1457. | NRLsKGLQI |
| 1458. | NRMsRRIVL |
| 1459. | NRRKsALAL |
| 1460. | NRRsPPPSL |
| 1461. | NRsWKYNQSISLR |
| 1462. | NRsWKYNQSISLRRP |
| 1463. | NRYtNRVVTF |
| 1464. | NRYNRVVTK |
| 1465. | NRYtNRVVTL |
| 1466. | NRYTNRVVTM |
| 1467. | NRYtNRVVTR |
| 1468. | NRYtNRVVTY |
| 1469. | NSDLPtSPL; NSDLPTsPL; |
| | NSDLPtsPL |
| 1470. | NSDsPLRY |
| 1471. | NSEsPLRY |
| 1472. | NSLsPRSSL |
| 1473. | NSVsPSESL |
| 1474. | NTDsPLRY |
| 1475. | NTEsPLRY |
| 1476. | NYQLsPTKL |
| 1477. | NYVERKNsK |
| 1478. | NYVERKNsL |
| 1479. | NYVERKNsY |
| 1480. | PEVsPRPAL |
| 1481. | PFKVsPLTF |
| 1482. | PIFNRIsV |
| 1483. | PIFPMARsI |
| 1484. | PLVSSSDsPPRPQPAF |
| 1485. | PMVTLsLNL |
| 1486. | PPLPEDSIKVIRNMRAAsP |
| 1487. | PPStSAAAL; PPSTsAAAL; |
| | PPsTSAAAL |
| 1488. | PRFsLDAEIDSL |
| 1489. | PRPANsGGVDL |
| 1490. | PRPsPGSNSKV |
| 1491. | PRPsPRQNSI |
| 1492. | PRQRAtSNVF |
| 1493. | PRsPPRAL |
| 1494. | PRWsPAVSA |
| 1495. | PSPPsPLEKTPL |
| 1496. | PtSPLAMEY |
| 1497. | PTsPLAMEY |
| 1498. | PtsPLAMEY |
| 1499. | PVRdPTRSP |
| 1500. | PWIPPSsPTTF |
| 1501. | PYDPALGsPSR |
| 1502. | PYDPALGsPSRLF |
| 1503. | QAASNFKsPVKTIR |
| 1504. | QAFLRSVsM |
| 1505. | QEKsPKQAL |
| 1506. | QKKIsTNL |
| 1507. | QLDRIsVYY |
| 1508. | QLDsPQRALY |
| 1509. | QLEsPQRALY |
| 1510. | QLFsPKKGQK |
| 151I. | QLSLRTVsL |
| 1512. | QMFsPKKGQK |
| 1513. | QMFSPKKGQK |
| 1514. | QPQRRsLRL |
| 1515. | QPRNSLPAsPAHQL |
| 1516. | QPRsPGPDYSF |
| 1517. | QPRsPGPDYSL |
| 1518. | QPRsPGPDYSM |
| 1519. | QPRsPGPDYSV |
| 1520. | QPRsPVPSAF |
| 1521. | QPRTPHsPPL |
| 1522. | QPRtPsPLVF |
| 1523. | QPRtPSPLVF |
| 1524. | QPRTPsPLVF |
| 1525. | QPRtPSPLVL |
| 1526. | QPRtPsPLVL |
| 1527. | QPRTPsPLVL |
| 1528. | QPRtPsPLVM |
| 1529. | QPRtPSPLVM |
| 1530. | QPRTPsPLVM |
| 1531. | QPRtPsPLVV |
| 1532. | QPRtPSPLVV |
| 1533. | QPRTPsPLVV |
| 1534. | QPSsPRVNGL |
| 1535. | QPStPDPFL |
| 1536. | QRLsPLSAAY |
| 1537. | QSDsPQRALY |
| 1538. | QSEsPQRALY |
| 1539. | QSLLsPLVL |
| 1540. | QTDsPQRALY |
| 1541. | QTEsPQRALY |
| 1542. | QTIsPLSTY |
| 1543. | QTPsPRLAL |
| 1544. | QTSIQsPSSY |
| 1545. | QVAMPVKKSPRRSsSDEQG |
| | LSYSSLKNV |
| 1546. | QVDPKKRIsM |
| | RASSDIVsL; RAssDIVSL; |
| | RAsSDIVsL; RASsDIVsL; |
| | RAssDIVsL; RASSDIVSL |
| 1547. | QVFsPKKGQK |
| 1548. | QVFsPKKGQY |
| 1549. | RAAsTARHL |
| 1550. | RAAtPLPSL |
| 1551. | RADsPGRLV |
| 1552. | RADsPVHM |
| 1553. | RADsPVHME |
| 1554. | RADsPVHMEQ |
| 1555. | RADsPVHMEQQ |
| 1556. | RAEsDFVKF |
| 1557. | RAEsPGPGSRL |
| 1558. | RAEsPTPGM |
| 1559. | RAFsFSKTPK |
| 1560. | RAFsFSKTPY |
| 1561. | RAFsVKFEV |
| 1562. | RAGsFSRFY |
| 1563. | RAHsEPLAL |
| 1564. | RAHsLARQM |
| 1565. | RAHSsPASL |
| 1566. | RAHtPTPGIYM |
| 1567. | RAIsPREKI |
| 1568. | RAKRIsQLF |
| 1569. | RAKsPISLK |
| 1570. | RAKsPISLY |
| 1571. | RALsPRVAA |
| 1572. | RALsSSVIREL |
| 1573. | RALtPSPVM |
| 1574. | RAPsPSSRF |
| 1575. | RAPsPSSRL |
| 1576. | RAPsPSSRM |
| 1577. | RAPsPSSRV |
| 1578. | RARGIsPIVF |
| 1579. | RAsSDIVSL; RASsDIVSL; |
| 1580. | RASsLSITV |
| 1581. | RASsPFRRV |
| 1582. | RAsVFVKL |
| 1583. | RAtSLPSL |
| 1584. | RATsLPSL |
| 1585. | RAtsLPSL |
| 1586. | RATsNVFAM |
| 1587. | RATsPLVSL |
| 1588. | RATsRcLQL |
| 1589. | RAVsPFAKI |
| 1590. | REtSPNRIGL; RETsPNRIGL; |
| | REtsPNRIGL |
| 1591. | REAPsPLMI |
| 1592. | REAsIELPSM |
| 1593. | REAsPAPLA |
| 1594. | REASPLSSNKLIL |
| 1595. | REAsPRLRV |
| 1596. | REAsPSRLSV |
| 1597. | REDsTPGKVFL |
| 1598. | REEsPLRIKM |
| 1599. | REGsFRVTTA |
| 1600. | REGsGRFSLP |
| | 160LREIMGtPEYL |
| 1602. | REIsSSPTS |
| 1603. | REKsPGRML |
| 1604. | REKsPLFQF |
| 1605. | REKsPLFQW |
| 1606. | REKsPLFQY |
| 1607. | RELARKGsL |
| 1608. | RELsGTIKEIL |
| 1609. | RELsPLISL |
| 1610. | RENsFGSPL |
| 1611. | RENsFGSPLEF |
| 1612. | REPsPALGPNL |
| 1613. | REPsPLPEL |
| 1614. | REPsPLPELAL |
| 1615. | REPsPVRYDNL |
| 1616. | RERsPGRLF |
| 1617. | RERsPSPSF |
| 1618. | RERWsFIRA |
| 1619. | REsPIPIEI |
| 1620. | REsPRPLQL; RESsLGFQL |
| 1621. | RESsPTRRL |
| 1622. | RETsPNRIGL |
| 1623. | REVEsLPAV; REVsPAPAV |
| 1624. | REVsPEPIV |
| 1625. | REWsPTPSL |
| 1626. | REWsPTPSSL |
| 1627. | REYGsPLKA |
| 1628. | REYGsTSSI |
| 1629. | RFKtQPVTF |
| 1630. | RFsFKKSF |
| 1631. | RGDGYGtF |
| 1632. | RGDsPKIDL |
| 1633. | RGDsRPRLV |
| 1634. | RGIsPIVF |
| 1635. | RGsFEVTL |
| 1636. | RHPKRSVsL |
| 1637. | RIDIsPSTL |
| 1638. | RIDsKDSASEL |
| 1639. | RIGsPLSPK |
| 1640. | RIHGsPLQK |
| 1641. | RILsATTSGIFL |
| 1642. | RILsGVVTK |
| 1643. | RILsGVVTKM |
| 1644. | RILsGVVTKMKM |
| 1645. | RILsGVVTY |
| 1646. | RILsKEYNM |
| 1647. | RILsPSMASK |
| 1648. | RILsPSMASY |
| 1649. | RINsFEEHV |
| 1650. | RIPsVQINF |
| 1651. | RIQsKLYRA |
| 1652. | RIQyIQSRF |
| 1653. | RIQyIQSRFY |
| 1654. | RIRPsTPSQL; RIRPStPSQL; |
| | RIRPstPSQL |
| 1655. | RIsHELDS |
| 1656. | RIStPLTGV |
| 1657. | RITsLIVHV |
| 1658. | RIVsPKNSDLK |
| 1659. | RIYQyIQ |
| 1660. | RIYQyIQSK |
| 1661. | RIYQyIQSR |
| 1662. | RIYQyIQSRF |
| 1663. | RIYQyIQSRFK |
| 1664. | RIYQyIQSRFY |
| 1665. | RIYQyIQSRK |
| 1666. | RIYQyIQSRY |
| 1667. | RIYQyIQSY |
| 1668. | RIYsMSLRL |
| 1669. | RKAsLRQFL |
| 1670. | RKLRsLEQL |
| 1671. | RKLsVILIK |
| 1672. | RKLsVILIL |
| 1673. | RKNsFVMEY |
| 1674. | RKPsAEMNRI |
| 1675. | RKPsIVTKY |
| 1676. | RKPsLAKAL |
| 1677. | RKSsIIIRM |
| 1678. | RLsSVSVTY; RLSsVSVTY; |
| | RLssVSVTY |
| 1679. | RLAsASRAL |
| 1680. | RLAsFAVRK |
| 1681. | RLASFAVRY |
| 1682. | RLAsIELPSM |
| 1683. | RLAsIELPSMAV |
| 1684. | RLAsIELPSV |
| 1685. | RLAsLMNLGM |
| 1686. | RLAsLNAEAL |
| 1687. | RLAsLNAEAV |
| 1688. | RLAsLQSEV |
| 1689. | RLAsLSISV |
| 1690. | RLAsPLVHK |
| 1691. | RLAsPLVHY |
| 1692. | RLAsPPPPPK |
| 1693. | RLAsPPPPPY |
| 1694. | RLAsPTSGV |
| 1695. | RLAsPTSGVK |
| 1696. | RLAsPTSGVKK |
| 1697. | RLASPTSGVKR |
| 1698. | RLAsPTSGVKY |
| 1699. | RLAsRPLLL |
| 1700. | RLAsSATQVHK |
| 1701. | RLASSVLRC |
| 1702. | RLAsSVLRcG |
| 1703. | RLAsYLDKV |
| 1704. | RLAsYLDRV |
| 1705. | RLAsYLSGC |
| 1706. | RLAsYLSGc |
| 1707. | RLDsIVGPQL |
| 1708. | RLDSPLSNRY |
| 1709. | RLDsTPGKVFL |
| 1710. | RLDsTPGKVFV |
| 1711. | RLDsYLRAP |
| 1712. | RLDsYVR |
| 1713. | RLDsYVR |
| 1714. | RLDsYVRS |
| 1715. | RLDsYVRSL |
| 1716. | RLDsYVRsL |
| 1717. | RLDsYVRSV |
| 1718. | RLDtGPQSL |
| 1719. | RLEsANRRL |
| 1720. | RLEsLSYQL |
| 1721. | RLFsFSKTPK |
| 1722. | RLFsHPREPAL |
| 1723. | RLFsKEL |
| 1724. | RLFsKELR |
| 1725. | RLFsKELRC |
| 1726. | RLFsKELRc |
| 1727. | RLFsKELRV |
| 1728. | RLFSLsNPSL |
| 1729. | RLFsPTYGL |
| 1730. | RLFsQGQDV |
| 1731. | RLFVGSIPK |
| 1732. | RLGsFHELL |
| 1733. | RLGsFHELLL |
| 1734. | RLIsFKAEV |
| 1735. | RLIsPYKKK |
| 1736. | RLIsQDVKL |
| 1737. | RLIsQIVSS |
| 1738. | RLIsQIVSSI |
| 1739. | RLIsQIVSSITA |
| 1740. | RLKLPSGSK |
| 1741. | RLKLPsGSKK |
| 1742. | RLKLPsGSKY |
| 1743. | RLKsDERPVHI |
| 1744. | RLKsIEERQLLK |
| 1745. | RLKsIIQEV |
| 1746. | RLKsPFRKK |
| 1747. | RLKsPGsGHVK |
| 1748. | RLKsPISLK |
| 1749. | RLKsPISLY |
| 1750. | RLKsPSPKSEK |
| 1751. | RLKsPSPKSER |
| 1752. | RLKtPTSQSYK |
| 1753. | RLKtPTSQSYR |
| 1754. | RLKTtPLRK |
| 1755. | RLKTtPLRR |
| 1756. | RLLDPSsPLAL; |
| | RLLDPsSPLAL; |
| | RLLDPssPLAL |
| 1757. | RLLDRSPsRSAK |
| 1758. | RLLDRSPsRSAY |
| 1759. | RLLsAAEN |
| 1760. | RLLsAAENFL |
| 1761. | RLLsDGQQHL |
| 1762. | RLLsDLEEL |
| 1763. | RLLsDQTRL |
| 1764. | RLLsFQRYL |
| 1765. | RLLsGVVTK |
| 1766. | RLLsGVVTY |
| 1767. | RLLsHISEA |
| 1768. | RLLsHISEV |
| 1769. | RLLsPLSSA |
| 1770. | RLLsPLSsA |
| 1771. | RLLsPLSSARL |
| 1772. | RLLsPLSSV |
| 1773. | RLLsPPLRPR |
| 1774. | RLLsPQQPAL |
| 1775. | RLLsPRPSL |
| 1776. | RLLsPRPSLL |
| 1777. | RLLsPSMASK |
| 1778. | RLLsSGVSEI |
| 1779. | RLLsSGVSEV |
| 1780. | RLLsTDAEAV |
| 1781. | RLLsVEGSTL |
| 1782. | RLLsVEIVK |
| 1783. | RLLsVEIVY |
| 1784. | RLLsVHDFDF |
| 1785. | RLLsVILIK |
| 1786. | RLLsVNIRV |
| 1787. | RLLsWSDNW |
| 1788. | RLMsGKVKV |
| 1789. | RLMsMPVAK |
| 1790. | RLMsMPVAY |
| 1791. | RLMtPKPVSI |
| 1792. | RLMtPTLSFL |
| 1793. | RLNtSDFQKL |
| 1794. | RLPNRIPsL |
| 1795. | RLPsFLKKNK |
| 1796. | RLPsLVHGY |
| 1797. | RLPSPtSPF |
| 1798. | RLPsSTLKK |
| 1799. | RLPsSTLKR |
| 1800. | RLPsSTLKY |
| 1801. | RLPRLPEI |
| 1802. | RLQsLIKNI |
| 1803. | RLQsTSERL |
| 1804. | RLQsTSERV |
| 1805. | RLQtQVFKL |
| 1806. | RLRQsPLATK |
| 1807. | RLRQsPLATR |
| 1808. | RLRQsPLATY |
| 1809. | RLRRsPLLK |
| 1810. | RLRsAGAAQK |
| 1811. | RLRsLSSLREK |
| 1812. | RLRsLssPTVTL |
| 1813. | RLRsLssPTVTV |
| 1814. | RLRsPPPVSK |
| 1815. | RLRSsLVFK |
| 1816. | RLRsSVPGV |
| 1817. | RLRSsVPGV |
| 1818. | RLRssVPGV |
| 1819. | RLRsYEDMI |
| 1820. | RLRTsPITRK |
| 1821. | RLRTSPITRR |
| 1822. | RLSDtPPLL |
| 1823. | RLsFLVSY |
| 1824. | RLsPVPVPR |
| 1825. | RLSsLIRHK |
| 1826. | RLSsLRASTSK |
| 1827. | RLSsPISKK |
| 1828. | RLSsPISKR |
| 1829. | RLSsPISKY |
| 1830. | RLSsPLHFV |
| 1831. | RLSSPVLHK |
| 1832. | RLSSPVLHR |
| 1833. | RLSsPVLHY |
| 1834. | RLSsRFSSK |
| 1835. | RLSsRFSSR |
| 1836. | RLSsRFSSY |
| 1837. | RLSsRYSQK |
| 1838. | RLSsRYSQY |
| 1839. | RLSsVKLISK |
| 1840. | RLSsVKLISY |
| 1841. | RLTFSPTYGV |
| 1842. | RLVSLSMRK |
| 1843. | RLVSLSMRY |
| 1844. | RLYKsEPEL |
| 1845. | RLYKsPLRH |
| 1846. | RLYKsPLRK |
| 1847. | RLYQyIQSK |
| 1848. | RLYQyIQSR |
| 1849. | RLYQyIQSRFK |
| 1850. | RLYQyIQSY |
| 1851. | RLYQyLQSRF |
| 1852. | RLYQyLQSRFK |
| 1853. | RLYQyLQSRFY |
| 1854. | RLYQyLQSRK |
| 1855. | RLYSGPMNKV |
| 1856. | RLYsGSRsK |
| 1857. | RLYSGSRSR |
| 1858. | RLYsGSRsY |
| 1859. | RLYsKSRDK |
| 1860. | RLYsPDHRQK |
| 1861. | RLYsPERSK |
| 1862. | RLYsPYNHK |
| 1863. | RLYsPYNHR |
| 1864. | RLYsPYNHY |
| 1865. | RLYSRsFSK |
| 1866. | RLYSRsFSY |
| 1867. | RLYsYPRQK |
| 1868. | RLYVTTSTRTYSLG |
| 1869. | RLYVTTSTRTYsLK |
| 1870. | RLYVTTSTRTYsLY |
| 1871. | RMAsPPPPPK |
| 1872. | RMAsPTSGV |
| 1873. | RMAsPTSGVK |
| 1874. | RMAsPTSGVKK |
| 1875. | RMASPTSGVKR |
| 1876. | RMAsPTSGVKY |
| 1877. | RMAsSATQVHK |
| 1878. | RMDsTPGKVFL |
| 1879. | RMDSTPGKVFV |
| 1880. | RMDsYVRSL |
| 1881. | RMDsYVRSV |
| 1882. | RMFPtPPSL |
| 1883. | RMFsFSKTPK |
| 1884. | RMFsKELRC |
| 1885. | RMFsKELRV |
| 1886. | RMFsPMEEK |
| 1887. | RMFsPMEEKELL |
| 1888. | RMFsPTYGL |
| 1889. | RMFsPTYGV |
| 1890. | RMIsKLEAQV |
| 1891. | RMISPYKKK |
| 1892. | RMIsQDVKL |
| 1893. | RMIsQDVKV |
| 1894. | RMIsTGSEL |
| 1895. | RMKLPSGSK |
| 1896. | RMKLPsGSKK |
| 1897. | RMKLPsGSKY |
| 1898. | RMKsPFRKK |
| 1899. | RMKsPGsGHVK |
| 1900. | RMKsPSPKSEK |
| 1901. | RMKSPSPKSER |
| 1902. | RMKtPTSQSYK |
| 1903. | RMKTPTSQSYR |
| 1904. | RMKTtPLRK |
| 1905. | RMKTTPLRR |
| 1906. | RMLDRSPsRSAK; |
| | RMLDRSPSRSAK; |
| | RMLDRSPSRsAK |
| 1907. | RMLDRSPsRSAY |
| 1908. | RMLsHISEA |
| 1909. | RMLsHISEV |
| 1910. | RMLsLRDQRL |
| 1911. | RMLsPLSSA |
| 1912. | RMLsPLSSV |
| 1913. | RMLsPSMASK |
| 1914. | RMLsSGVSEI |
| 1915. | RMLsSGVSEV |
| 1916. | RMLsVILIK |
| 1917. | RMPsFLKKNK |
| 1918. | RMPsSTLKK |
| 1919. | RMPsSTLKR |
| 1920. | RMQsTSERL |
| 1921. | RMQsTSERV |
| 1922. | RMRQsPLATK |
| 1923. | RMRQSPLATR |
| 1924. | RMRRsPLLK |
| 1925. | RMRsAGAAQK |
| 1926. | RMRsLSSLREK |
| 1927. | RMRsPPPVSK |
| 1928. | RMRTsPITRK |
| 1929. | RMRTSPITRR |
| 1930. | RMsLLSVV |
| 1931. | RMSSLIRHK |
| 1932. | RMSsPISKK |
| 1933. | RMSsPISKR |
| 1934. | RMSsPLHFV |
| 1935. | RMSsPVLHK |
| 1936. | RMSsRYSQK |
| 1937. | RMSsVKLISK |
| 1938. | RMSsVKLISY |
| 1939. | RMVsLSMRK |
| 1940. | RMVsLSMRY |
| 1941. | RMYKSPLRH |
| 1942. | RMYKsPLRK |
| 1943. | RMYQyIQSK |
| 1944. | RMYQyIQSR |
| 1945. | RMYQyLQSRF |
| 1946. | RMYQyLQSRFK |
| 1947. | RMYQyLQSRK |
| 1948. | RMYsFDDVL |
| 1949. | RMYsGSRSK; RMYSGsRSK; |
| | RMYSGSRsK; RMYsGsRSK; |
| | RMYSGsRsK; RMYsGsRsK |
| 1950. | RMYsGSRSR; RMYSGsRSR; |
| | RMYSGSRsR; RMYsGsRSR; |
| | RMYSGsRsR; RMYsGsRsR |
| 1951. | RMYsKSRDH |
| 1952. | RMYsKSRDK |
| 1953. | RMYsKSRDY |
| 1954. | RMYsPDHRQK |
| 1955. | RMYsPERSK |
| 1956. | RMYsPIIYQA |
| 1957. | RMYsPIPPSL |
| 1958. | RMYsPRNSK |
| 1959. | RMYSPYNHK |
| 1960. | RMYSPYNHR |
| 1961. | RMYsYPRQK |
| 1962. | RMYVTTSTRTYSLG |
| 1963. | RMYVTTSTRTYSLK |
| 1964. | RMYVTTSTRTYSLY |
| 1965. | RNKsYSFIA |
| 1966. | RNLsSPFIF |
| 1967. | RPsSAPDLM; RPSsAPDLM; |
| | RPssAPDLM |
| 1968. | RPsSGFYEL; RPSsGFYEL; |
| | RPssGFYEL |
| 1969. | RPsSLPDL; RPSsLPDL; |
| | RPssLPDL |
| 1970. | RPsSPALYF; RPSSPALYF; |
| | RPssPALYF |
| 1971. | RPsSPIPLL; RPSsPIPLL; |
| | RPssPIPLL |
| 1972. | RPsTPTIDVL; RPStPTIDVL; |
| | RPstPTIDVL |
| 1973. | RPsTPTINV; RPStPTINV; |
| | RPstPTINV |
| 1974. | RPsTPTINVL; RPStPTINVL; |
| | RPstPTINVL |
| 1975. | RPtSPIQIM; RPTsPIQIM; |
| | RPtsPIQIM |
| 1976. | RPAsTGGLSL; |
| | RPAStGGLSL; RPAstGGLSL |
| 1977. | RPAFFsPSL; RPAKsLMSI |
| 1978. | RPAKsMDSF |
| 1979. | RPAKsMDSL |
| 1980. | RPAKsMDSM |
| 1981. | RPAKsMDV |
| 1982. | RPARPsRKGL |
| 1983. | RPAsAGAMF |
| 1984. | RPAsAGAML |
| 1985. | RPAsAGAMM |
| 1986. | RPAsAGAMV |
| 1987. | RPAsARAQPGF |
| 1988. | RPAsARAQPGL |
| 1989. | RPAsARAQPGM |
| 1990. | RPAsARAQPGV |
| 1991. | RPAsEARAPGL |
| 1992. | RPAsPAAKF |
| 1993. | RPAsPAAKL |
| 1994. | RPAsPAAKM |
| 1995. | RPAsPAAKV |
| 1996. | RPAsPALLL |
| 1997. | RPAsPEPEL |
| 1998. | RPAsPGPSL |
| 1999. | RPAsPLMHI |
| 2000. | RPAsPQRAQL |
| 2001. | RPAsPSLQL |
| 2002. | RPAsPSLQLL |
| 2003. | RPAsPtAIRRIGSVTSRQT |
| 2004. | RPAsRFEVL |
| 2005. | RPAsYKKKSML |
| 2006. | RPAtFFPFVA |
| 2007. | RPAtGGPGVA |
| 2008. | RPAtGGPGVF |
| 2009. | RPAtGGPGVL |
| 2010. | RPAtGGPGVM |
| 2011. | RPAtGGPGVV |
| 2012. | RPAtPHLL |
| 2013. | RPAtPTSQF |
| 2014. | RPAtPTSQL |
| 2015. | RPAtPTSQM |
| 2016. | RPAtPTSQV |
| 2017. | RPDsAHKML |
| 2018. | RPDsPTRPTL |
| 2019. | RPDsRLGKTEF |
| 2020. | RPDsRLGKTEL |
| 2021. | RPDsRLGKTEL |
| 2022. | RPDsRLGKTEM |
| 2023. | RPDsRLGKTEV |
| 2024. | RPDsRLLEL |
| 2025. | RPDVAKRLsL |
| 2026. | RPEsDSGLKF |
| 2027. | RPEsDSGLKL |
| 2028. | RPEsDSGLKM |
| 2029. | RPEsDSGLKV |
| 2030. | RPEsKDRKF |
| 2031. | RPEsKDRKL |
| 2032. | RPEsKDRKM |
| 2033. | RPEsKDRKV |
| 2034. | RPEsPAGPF |
| 2035. | RPFHGISTVsL |
| 2036. | RPFsPREAF |
| 2037. | RPFsPREAL |
| 2038. | RPFsPREAM |
| 2039. | RPFsPREAV |
| 2040. | RPGsLERKF |
| 2041. | RPGsLERKL |
| 2042. | RPGsLERKM |
| 2043. | RPGsLERKV |
| 2044. | RPGsRQAGL |
| 2045. | RPHLSGRKLsL |
| 2046. | RPHsPEKAF |
| 2047. | RPHsPEKAL |
| 2048. | RPHsPEKAM |
| 2049. | RPHsPEKAV |
| 2050. | RPHtPTPGI |
| 2051. | RPHtPTPGIYM |
| 2052. | RPIsPGLSF |
| 2053. | RPIsPGLSL |
| 2054. | RPIsPGLSM |
| 2055. | RPIsPGLSV |
| 2056. | RPIsPGLSY |
| 2057. | RPIsPPHTY |
| 2058. | RPIsPRIGAL |
| 2059. | RPIsVIGGVSL |
| 2060. | RPIsVIGGVSLY |
| 2061. | RPItPPRNSA |
| 2062. | RPItPPRNSF |
| 2063. | RPItPPRNSL |
| 2064. | RPItPPRNSM |
| 2065. | RPItPPRNSV |
| 2066. | RPKLHHSLsF |
| 2067. | RPKLSsPAF |
| 2068. | RPKLSsPAL |
| 2069. | RPKLSsPAM |
| 2070. | RPKLSsPAV |
| 2071. | RPKPSSSPVIF; |
| | RPKPSsSPVIF; RPKPsssPVIF; |
| | RPKPsSSPVIF; RPKPSssPVIF; |
| | RPKPsSsPVIF |
| 2072. | RPKPSSsPL |
| 2073. | RPKPSSsPM |
| 2074. | RPKPSSsPV |
| 2075. | RPKPSSsPVI |
| 2076. | RPKsDIVLL |
| 2077. | RPKsNIVLF |
| 2078. | RPKsNIVLL |
| 2079. | RPKsNIVLM |
| 2080. | RPKsNIVLV |
| | RPLsssHEA |
| 2082. | RPKsPLSKM |
| 2083. | RPKsQVAEF |
| 2084. | RPKsQVAEL |
| 2085. | RPKsQVAEM |
| 2086. | RPKsQVAEV |
| 2087. | RPKSSsPIRL |
| 2088. | RPKsVDFDSL |
| 2089. | RPKtPNRASP |
| 2090. | RPKtPPPAP |
| 2091. | RPKtPPVVI |
| 2092. | RPLKPLsPL |
| 2093. | RPLsATRKTL |
| 2094. | RPLsGSGISAF |
| 2095. | RPLsHYSSF |
| 2096. | RPLsKQLSA |
| 2097. | RPLsLIGSTL |
| 2098. | RPLsLLLAL |
| 2099. | RPLsPGALEL |
| 2100. | RPLsPGALQL |
| 2101. | RPLSPGGAF |
| 2102. | RPLsPGGAL |
| 2103. | RPLsPGGAM |
| 2104. | RPLsPGGAV |
| 2105. | RPLsPILHI |
| 2106. | RPLsPLLF |
| 2107. | RPLsPLLL |
| 2108. | RPLsPLLM |
| 2109. | RPLsPLLV |
| 2110. | RPLsPTAFSL |
| 2111. | RPLSSSHEA; RPLSsSHEA; |
| | RPLSSsHEA; RPLssSHEA; |
| | RPLsSsHEA; RPLSssHEA; |
| | RPPtsPGVFGAL |
| 2112. | RPLsVVYVL |
| 2113. | RPLtPRTPA |
| 2114. | RPLTsPESL |
| 2115. | RPMsESPHM |
| 2116. | RPNsPSPTAF |
| 2117. | RPNsPSPTAL |
| 2118. | RPNsPSPTAM |
| 2119. | RPNsPSPTAV |
| 2120. | RPPItQSSL; (Me)RPPItQSSL; |
| | (diMe)RPPItQSSL |
| 2121. | RPPPPPDtPF |
| 2122. | RPPPPPDtPL |
| 2123. | RPPPPPDtPM |
| 2124. | RPPPPPDtPP |
| 2125. | RPPPPPDtPV |
| 2126. | RPPQsSSVSL |
| 2127. | RPPsPGPVF |
| 2128. | RPPsPGPVL |
| 2129. | RPPsPGPVM |
| 2130. | RPPsPGPVV |
| 2131. | RPPsPSSRF |
| 2132. | RPPsPSSRL |
| 2133. | RPPsPSSRM |
| 2134. | RPPsPSSRV |
| 2135. | RPPsSEFLDF |
| 2136. | RPPsSEFLDL |
| 2137. | RPPsSEFLDM |
| 2138. | RPPsSEFLDV |
| 2139. | RPPsSSQQL |
| 2140. | RPPtPTLSL |
| 2141. | RPPtSPGVFGAL; |
| | RPPTsPGVFGAL; |
| | RPRDTRRIsL |
| 2142. | RPPVtKASSF |
| 2143. | RPQKTQsII |
| 2144. | RPQRAtSNVF; |
| | RPQRATsNVF; |
| | RPQRAtsNVF; RPQRATsNVF |
| 2145. | RPQRAtSNVF |
| 2146. | RPQRAtSNVL; |
| | RPQRATsNVL |
| 2147. | RPQRAtSNVM; |
| | RPQRATsNVM |
| 2148. | RPQRAtSNVV; |
| | RPQRATsNVV |
| 2149. | RPQtPKEEA |
| 2150. | RPRsISVEEF; RPRSIsVEEF; |
| | RPRsIsVEEF |
| 2151. | RPRSPSPIS; RPRSPsPIS; |
| | RPRsPsPIS |
| 2152. | RPRsTSQSIVSL; |
| | RPRStSQSIVSL; |
| | RPRSTsQSIVSL; |
| | RPRstSQSIVSL; |
| | RPRsTsQSIVSL; |
| | RPRStsQSIVSL; |
| | RPRstsQSIVSL |
| 2153. | RPRAAtVV |
| 2154. | RPRAAtVVA |
| 2155. | RPRANsGGVDF |
| 2156. | RPRANsGGVDL |
| 2157. | RPRANsGGVDM |
| 2158. | RPRANSGGVDV |
| 2159. | RPRARsVDAL |
| 2160. | RPRDTRRIsL; RPRDtRRISL; |
| 2161. | RPRGPsPLVTM |
| 2162. | RPRGsESLL |
| 2163. | RPRGsQSLF |
| 2164. | RPRGsQSLL |
| 2165. | RPRGsQSLM |
| 2166. | RPRGsQSLV |
| 2167. | RPRHsLNSL |
| 2168. | RPRIPsPIGF |
| 2169. | RPRPGtGLGRVm |
| 2170. | RPRPsSVL; RPRPSsVL; |
| | RPRPssVL |
| 2171. | RPRPASSPAL |
| 2172. | RPRPHsAPSF |
| 2173. | RPRPHsAPSL |
| 2174. | RPRPHsAPSM |
| 2175. | RPRPHsAPSV |
| 2176. | RPRPSsAHVGL |
| 2177. | RPRPsSVL |
| 2178. | RPRPsSVLRTL |
| 2179. | RPRPVsPSSF |
| 2180. | RPRPVsPSSL |
| 2181. | RPRPVsPSSLL |
| 2182. | RPRPVsPSSM |
| 2183. | RPRPVsPSSV |
| 2184. | RPRRsSTQF |
| 2185. | RPRRsSTQL |
| 2186. | RPRRsSTQM |
| 2187. | RPRRsSTQV |
| 2188. | RPRsAVEQL |
| 2189. | RPRsAVLF |
| 2190. | RPRsAVLL |
| 2191. | RPRsAVLM |
| 2192. | RPRsAVLV |
| 2193. | RPRSGsTGSSL; |
| | RPRSGStGSSL; |
| | RPRSGstGSSL; |
| | RPRSGsTGSSL |
| 2194. | RPRsISVEEF; RPRSIsVEEF; |
| | RPRsIsVEEF |
| 2195. | RPRsISVEEM |
| 2196. | RPRsISVEEV |
| 2197. | RPRSLSSPTV; RPRSLSsPTV; |
| | RPRSLssPTV |
| 2198. | RPRSLsSPTVTL; |
| | RPRSLSsPTVTL; |
| | RPRSLssPTVTL |
| 2199. | RPRsLEVTF |
| 2200. | RPRsLEVTI |
| 2201. | RPRSLEVTL |
| 2202. | RPRsLEVTM |
| 2203. | RPRsLEVTV |
| 2204. | RPRSLsSPTV |
| 2205. | RPRSLsSPTVTL; |
| | RPRsLssPTVTL |
| 2206. | RPRSLsSPTVTM |
| 2207. | RPRSLsSPTVTV; |
| | RPRsLssPTVTV |
| 2208. | RPRsMTVSA |
| 2209. | RPRsMVRSF |
| 2210. | RPRsPAARF |
| 2221. | ERPRsPAARL |
| 2212. | RPRsPAARM |
| 2213. | RPRsPAARV |
| 2214. | RPRsPGSNSKV |
| 2215. | RPRsPGSNSKVP |
| 2216. | RPRsPNMQDL |
| 2217. | RPRsPPGGP |
| 2218. | RPRsPPPRAF |
| 2219. | RPRsPPPRAL |
| 2220. | RPRsPPPRAM |
| 2221. | RPRsPPPRAP |
| 2222. | RPRsPPPRAV |
| 2223. | RPRsPPSSP |
| 2224. | RPRsPRENSF |
| 2225. | RPRsPRENSI |
| 2226. | RPRsPRENSL |
| 2227. | RPRsPRENSM |
| 2228. | RPRsPRENSV |
| 2229. | RPRsPRPPP |
| 2230. | RPRsPRQNLI |
| 2231. | RPRsPRQNSF |
| 2232. | RPRsPRQNSI |
| 2233. | RPRsPRQNSM |
| 2234. | RPRsPRQNSV |
| 2235. | RPRsPSPIF |
| 2236. | RPRsPSPIL |
| 2237. | RPRsPSPIM |
| 2238. | RPRsPSPIS; RPRSPsPIS; |
| | RPRsPsPIS |
| 2239. | RPRsPSPIV |
| 2240. | RPRsPSSYDL |
| 2241. | RPRsPTGF |
| 2242. | RPRsPTGL |
| 2243. | RPRsPTGM |
| 2244. | RPRsPTGP |
| 2245. | RPRsPTGPSNSF; |
| | RPRsPTGPsNSF |
| 2246. | RPRsPTGPSNSFL |
| 2247. | RPRsPTGPsNSL |
| 2248. | RPRsPTGPsNSM |
| 2249. | RPRsPTGPsNSV |
| 2250. | RPRsPTGsNSF |
| 2251. | RPRsPTGV |
| 2252. | RPRsPTRSF |
| 2253. | RPRsPTRSL |
| 2254. | RPRsPTRSM |
| 2255. | RPRsPTRSV |
| 2256. | RPRsPWGKL |
| 2257. | RPRsQYNTKL |
| 2258. | RPRTNtPKQL |
| 2259. | RPRtPLRSL |
| 2260. | RPSGRREsF |
| 2261. | RPSGRREsL |
| 2262. | RPSGRREsM |
| 2263. | RPSGRREsV |
| 2264. | RPsLGGRTPL |
| 2265. | RPsNPQL |
| 2266. | RPSRSsPGF |
| 2267. | RPSRSsPGL |
| 2268. | RPSRSsPGM |
| 2269. | RPSRSsPGV |
| 2270. | RPSsGFYEL |
| 2271. | RPsSAPDLM |
| 2272. | RPSsLDAEIDSF |
| 2273. | RPSsLDAEIDSL |
| 2274. | RPSsLDAEIDSM |
| 2275. | RPSsLDAEIDSV |
| 2276. | RPSsLPDF |
| 2277. | RPSsLPDL |
| 2278. | RPSsLPDM |
| 2279. | RPSsLPDV |
| 2280. | RPsSPALYF; RPSsPALYF |
| 2281. | RPsSPALYL |
| 2282. | RPsSPALYM |
| 2283. | RPsSPALYV |
| 2284. | RPSsPRAGAPHAL |
| 2285. | RPSsPRVEDL |
| 2286. | RPSsPSTSw |
| 2287. | RPSsRAVLY |
| 2288. | RPSsRVALMVL |
| 2289. | RPSsVLIEQL |
| 2290. | RPStPGLSV |
| 2291. | RPStPHTITL |
| 2292. | RPStPKSDSEF |
| 2293. | RPStPKSDSEL |
| 2294. | RPStPKSDSEM |
| 2295. | RPStPKSDSEV |
| 2296. | RPStPSRLAL |
| 2297. | RPTKIGRRsL |
| 2298. | RPTsFADEL |
| 2299. | RPTsISWDGL; RPTsISwDGL |
| 2300. | RPTsPIQIM |
| 2301. | RPTsRLNRF |
| 2302. | RPTsRLNRL |
| 2303. | RPTsRLNRLP |
| 2304. | RPTsRLNRM |
| 2305. | RPTsRLNRV |
| 2306. | RPVDPRRRsL |
| 2307. | RPVsPAGPP |
| 2308. | RPVsPAPGA |
| 2309. | RPVsPFQEF |
| 2310. | RPVsPFQEL |
| 2311. | RPVsPFQEM |
| 2312. | RPVsPFQEV |
| 2313. | RPVsPGKDF |
| 2314. | RPVsPGKDI |
| 2315. | RPVsPGKDITA |
| 2316. | RPVsPGKDL |
| 2317. | RPVsPGKDM |
| 2318. | RPVsPGKDV |
| 2319. | RPVsPHSDF |
| 2320. | RPVsPPQKA |
| 2321. | RPVsPSAYm |
| 2322. | RPVsPSSLL |
| 2323. | RPVSPsSLL |
| 2324. | RPVsTDFAQY |
| 2325. | RPVtASITTM |
| 2326. | RPVtPITNF |
| 2327. | RPVtPPRTA |
| 2328. | RPVtPVSDF |
| 2329. | RPVtPVSDL |
| 2330. | RPVtPVSDL |
| 2331. | RPVtPVSDM |
| 2332. | RPVtPVSDV |
| 2333. | RPWsNSRGL |
| 2334. | RPwsNSRGL |
| 2335. | RPWsPAVSA |
| 2336. | RPwsPAVSA |
| 2337. | RPWsPAVSF |
| 2338. | RPWsPAVSL |
| 2339. | RPWsPAVSM |
| 2340. | RPWsPAVSV |
| 2341. | RPWsPPPTGSL |
| 2342. | RPYPsPGAVL |
| 2343. | RPYsPPFF |
| 2344. | RPYsPPFFSF |
| 2345. | RPYsPPFFSL |
| 2346. | RPYsPPFFSM |
| 2347. | RPYsPPFFSV |
| 2348. | RPYsPSEYAL |
| 2349. | RPYsPSQYAL |
| 2350. | RPYsQVNVL |
| 2351. | RPYtNKVITL |
| 2352. | RQAsIELPSM |
| 2353. | RQAsIELPSMAV |
| 2354. | RQAsIELPSMAVA |
| 2355. | RQAsIELPSV |
| 2356. | RQAsLSISV |
| 2357. | RQAsPLVHK |
| 2358. | RQAsPLVHR |
| 2359. | RQAsPLVHY |
| 2360. | RQAsPPRRL |
| 2361. | RQDsTPGKVFL |
| 2362. | RQDStPGKVFL |
| 2363. | RQDsTPGKVFV |
| 2364. | RQFMRRTsL |
| 2365. | RQIsTSGEL |
| 2366. | RQIStSGEL |
| 2367. | RQIstSGEL |
| 2368. | RQIsFKAEV |
| 2369. | RQIsQDVKL |
| 2370. | RQIsQDVKV |
| 2371. | RQKsPLFQF |
| 2372. | RQLsALHRA |
| 2373. | QLsLEGSGLGV |
| 2374. | RQLsSGVSEI |
| 2375. | RQLsSGVSEV |
| 2376. | RQMsGAQIKI |
| 2377. | RQMsRFKEA |
| 2378. | RQPsEEEII |
| 2379. | RQPsEEEIIKL |
| 2380. | RQPsIELPSM |
| 2381. | RQPsLAKRV |
| 2382. | RQPsLKRSL |
| 2383. | RQSsFEPEF |
| 2384. | RQSsSRFNL |
| 2385. | RQYsVTDAL |
| 2386. | RRsSIQSTF; RRSsIQSTF; |
| | RRssIQSTF |
| 2387. | RRsSQSWSL; RRSsQSwSL |
| 2388. | RRSsIQSTF; RRssIQSTF |
| 2389. | RRsSYLLAI; RRSsYLLAI; |
| | RRssYLLAI |
| 2390. | RRAsFAKSF; RRASFAKsF; |
| | RRAsFAKsF |
| 2391. | RRAsFAKSK; RRASFAKsK; |
| | RRASFAKsK |
| 2392. | RRAsFAKSL; RRASFAKsL; |
| | RRAsFAKsL |
| 2393. | RRAsFAKSM; RRASFAKsM; |
| | RRAsFAKsM |
| 2394. | RRAsFAKSR; RRASFAKsR; |
| | RRASFAKsR |
| 2395. | RRAsIITKY |
| 2396. | RRAsLSEIGF |
| 2397. | RRAsLSEIGK |
| 2398. | RRAsLSEIGY |
| 2399. | RRAsLSYSF |
| 2400. | RRAsQEANL |
| 2401. | RRAsSPFRF |
| 2402. | RRAsSPFRK |
| 2403. | RRAsSPFRL |
| 2404. | RRAsSPFRM |
| 2405. | RRAsSPFRR |
| 2406. | RRAsVFVKF |
| 2407. | RRAsVFVKK |
| 2408. | RRAsVFVKL |
| 2409. | RRAsVFVKM |
| 2410. | RRAsVFVKR |
| 241I. | RRDsIVAEF |
| 2412. | RRDsIVAEK |
| 2413. | RRDsIVAEL |
| 2414. | RRDsIVAER |
| 2415. | RRDsIVAEY |
| 2416. | RRDsLQKPGL |
| 2417. | RRFsTEYEL; RRFStEYEL; |
| | RRFstEYEL |
| 2418. | RRFsDFLGL |
| 2419. | RRFsFKF |
| 2420. | RRFsFKK |
| 2421. | RRFsFKKSF |
| 2422. | RRFsFKKSK |
| 2423. | RRFsFKKSL |
| 2424. | RRFsFKKSM |
| 2425. | RRFsFKKSR |
| 2426. | RRFsFKL |
| 2427. | RRFsFKM |
| 2428. | RRFsFKR |
| 2429. | RRFsFSGNTL |
| 2430. | RRFsGLLN |
| 2431. | RRFsGLLNC; RRFsGLLNc |
| 2432. | RRFsGTAVY |
| 2433. | RRFsGTVRF |
| 2434. | RRFsGTVRK |
| 2435. | RRFsGTVRL |
| 2436. | RRFsGTVRM |
| 2437. | RRFsGTVRR |
| 2438. | RRFsIATLR |
| 2439. | RRFSLSPSL |
| 2440. | RRFSLTTLR |
| 2441. | RRFSLTTLRNF |
| 2442. | RRFSLTTLRNY |
| 2443. | RRFSPDDKYSF |
| 2444. | RRFSPDDKYSK |
| 2445. | RRFSPDDKYSL |
| 2446. | RRFPDDKYSM |
| 2447. | RRFSPDDKYSR |
| 2448. | RRFSPPRRF |
| 2449. | RRFSPPRRK |
| 2450. | RRFSPPRRL |
| 2451. | RRFSPPRRM |
| 2452. | RRFSPPRRML |
| 2453. | RRFSPPRRR |
| 2454. | RRFSPPRRY |
| 2455. | RRFSRLENRY |
| 2456. | RRFSRSDEL |
| 2457. | RRFSRSPIF; RRFsRsPIF; |
| | RRFsRSPIK |
| 2458. | RRFsRsPIK |
| 2459. | RRFsRSPIL; RRFsRsPIL |
| 2460. | RRFSRSPIM |
| 2461. | RRFSRsPIR; RRFsRSPIR; |
| | RRFsRsPIR |
| 2462. | RRFsRSPIRF; RRFsRsPIRF; |
| | RRFsRSPIRK |
| 2463. | RRFsRsPIRK |
| 2464. | RRFsRSPIRL; RRFsRsPIRL |
| 2465. | RRFsRsPIRR; RRFsRSPIRR |
| 2466. | RRFsRSPIRY:RRFsRsPIRY |
| 2467. | RRFsRSPIY; RRFsRsPIY |
| 2468. | RRFsRSPK |
| 2469. | RRFsSSDFSDL |
| 2470. | RRFsSYSQM |
| 2471. | RRFsVSTLR |
| 2472. | RRFsVSTLRNL |
| 2473. | RRFsVSTLRNLGL |
| 2474. | RRFsVSTLRNLGLG |
| 2475. | RRFsVSTLRNLGLGK |
| 2476. | RRFsVTLRL |
| 2477. | RRFsVTTMR |
| 2478. | RRFtEIYEF |
| 2479. | RRFtPPSPAF |
| 2480. | RRFtPPSPAK |
| 2481. | RRFtPPSPAR |
| 2482. | RRFtPPSPAY |
| 2483. | RRGsFEVTL |
| 2484. | RRGsFEVTLL |
| 2485. | RRGsFPLAA |
| 2486. | RRGsGPEIF |
| 2487. | RRGsGPEIFT |
| 2488. | RRGsGPEIFTF |
| 2489. | RRGsLLGSM |
| 2490. | RRGsLTLTI |
| 2491. | RRGsNVALM |
| 2492. | RRGsPVRQL |
| 2493. | RRGsYPFIDF |
| 2494. | RRHsASNLHAL |
| 2495. | RRHsLENKV |
| 2496. | RRIDIsPSTF |
| 2497. | RRIDIsPSTFRK |
| 2498. | RRIDIsPSTK |
| 2499. | RRIDIsPSTL |
| 2500. | RRIDIsPSTLR |
| 2501. | RRIDIsPSTLRK |
| 2502. | RRIDIsPSTR |
| 2503. | RRIDIsPSTY |
| 2504. | RRIsDPEVF |
| 2505. | RRIsDPQVF |
| 2506. | RRISGVDRF |
| 2507. | RRISGVDRK |
| 2508. | RRISGVDRL |
| 2509. | RRISGVDRM |
| 2510. | RRIsGVDRR |
| 2511. | RRIsGVDRY |
| 2512. | RRIsGVDRYF |
| 2513. | RRIsGVDRYK |
| 2514. | RRIsGVDRYK |
| 2515. | RRIsGVDRYL |
| 2516. | RRIsGVDRYR |
| 2517. | RRIsGVDRYY |
| 2518. | RRIsIGSLF |
| 2519. | RRIsLTKRL |
| 2520. | RRIsQIQQL |
| 2521. | RRIsVFKYV |
| 2522. | RRIsVTSKV |
| 2523. | RRKsDDVHL |
| 2524. | RRKsLVLKF |
| 2525. | RRKsPPPSF |
| 2526. | RRKsPPPSK |
| 2527. | RRKsPPPSL |
| 2528. | RRKsPPPSM |
| 2529. | RRKsPPPSR |
| 2530. | RRKsQLDSF |
| 2531. | RRKsQLDSK |
| 2532. | RRKsQLDSL |
| 2533. | RRKSQLDSM |
| 2534. | RRKsQLDSR |
| 2535. | RRKsQLDSY |
| 2536. | RRKsQVAEF |
| 2537. | RRKsQVAEK |
| 2538. | RRKsQVAEL |
| 2539. | RRKsQVAEM |
| 2540. | RRKsQVAER |
| 2541. | RRKsQVAEV |
| 2542. | RRKsQVAEY |
| 2543. | RRLGSPHRF |
| 2544. | RRLGSPHRK |
| 2545. | RRLGSPHRL |
| 2546. | RRLGSPHRM |
| 2547. | RRLGSPHRR |
| 2548. | RRLsAARLL |
| 2549. | RRLsADIRF |
| 2550. | RRLsADIRK |
| 2551. | RRLsADIRL |
| 2552. | RRLSADIRM |
| 2553. | RRLsADIRR |
| 2554. | RRLsADIRY |
| 2555. | RRLsDSPVF |
| 2556. | RRLsELLRY |
| 2557. | RRLsERETR |
| 2558. | RRLsESSAL |
| 2559. | RRLsFLVSF |
| 2560. | RRLsFLVSK |
| 2561. | RRLsFLVSL |
| 2562. | RRLSFLVSM |
| 2563. | RRLsFLVSR |
| 2564. | RRLsFLVSY |
| 2565. | RRLsFQAEY |
| 2566. | RRLsGELISM |
| 2567. | RRLsGGSHSF |
| 2568. | RRLSGGSHSK |
| 2569. | RRLsGGSHSL |
| 2570. | RRLSGGSHSM |
| 2571. | RRLSGGSHSR |
| 2572. | RRLsGGSHSY |
| 2573. | RRLSGPLHTF |
| 2574. | RRLSGPLHTK |
| 2575. | RRLSGPLHTL |
| 2576. | RRLSGPLHTM |
| 2577. | RRLSGPLHTR |
| 2578. | RRLSGPLHTV |
| 2579. | RRLSLFLNV |
| 2580. | RRLsLFLVL |
| 2581. | RRLsLPGLL |
| 2582. | RRLSLSRSL |
| 2583. | RRLSNLPTF |
| 2584. | RRLSNLPTK |
| 2585. | RRLSNLPTR |
| 2586. | RRLSNLPTV |
| 2587. | RRLSNLPTY |
| 2588. | RRLSPAPQF |
| 2589. | RRLSPAPQK |
| 2590. | RRLSPAPQL |
| 2591. | RRLSPAPQM |
| 2592. | RRLSPAPQR |
| 2593. | RRLSPKASQVF |
| 2594. | RRLSPKASQVK |
| 2595. | RRLSPKASQVL |
| 2596. | RRLSPKASQVM |
| 2597. | RRLSPKASQVR |
| 2598. | RRLSPVPVPF |
| 2599. | RRLSPVPVPK |
| 2600. | RRLSPVPVPL |
| 2601. | RRLSPVPVPM |
| 2602. | RRLSPVPVPR |
| 2603. | RRLSRELQF |
| 2604. | RRLSRELQK |
| 2605. | RRLSRELQL |
| 2606. | RRLSRELQM |
| 2607. | RRLSRELQR |
| 2608. | RRLsRKL |
| 2609. | RRLsRKLSL |
| 2610. | RRLsSQFEN |
| 261I. | RRLsVEIYDKF |
| 2612. | RRLSVERIF |
| 2613. | RRLSVERIK |
| 2614. | RRLSVERIL |
| 2615. | RRLSVERIM |
| 2616. | RRLSVERIR |
| 2617. | RRLsYVLFI |
| 2618. | RRLTHLSF |
| 2619. | RRLTHLSK |
| 2620. | RRLTHLSL |
| 2621. | RRLTHLSM |
| 2622. | RRLTHLSR |
| 2623. | RRLtLHSVF |
| 2624. | RRMsFQKP |
| 2625. | RRMsFSGIFR |
| 2626. | RRMsLLSVF |
| 2627. | RRMsLLSVK |
| 2628. | RRMsLLSVL |
| 2629. | RRMsLLSVM |
| 2630. | RRMsLLSVR |
| 2631. | RRMsLLSVV |
| 2632. | RRMsLLSVY |
| 2633. | RRMSPKAQF |
| 2634. | RRMSPKAQK |
| 2635. | RRMSPKAQL |
| 2636. | RRMSPKAQM |
| 2637. | RRMSPKAQR |
| 2638. | RRMSPKPF |
| 2639. | RRMSPKPK |
| 2640. | RRMSPKPL |
| 2641. | RRMSPKPM |
| 2642. | RRMSPKPR |
| 2643. | RRMsVAEQVDY |
| 2644. | RRMsVGDRAG |
| 2645. | RRNsAPVSV |
| 2646. | RRNsFIGTPY |
| 2647. | RRNSINRNF |
| 2648. | RRNsISLREL |
| 2649. | RRNsKIFLDL |
| 2650. | RRNsLLHGY |
| 2651. | RRNSNPVIAEF |
| 2652. | RRNSNPVIAEK |
| 2653. | RRNSNPVIAEL |
| 2654. | RRNSNPVIAEM |
| 2655. | RRNSNPVIAER |
| 2656. | RRNsSERTF |
| 2657. | RRNSSERTK |
| 2658. | RRNsSERTL |
| 2659. | RRNsSERTM |
| 2660. | RRNSSERTR |
| 2661. | RRNSSERTY |
| 2662. | RRNsSIVGF |
| 2663. | RRNsSIVGK |
| 2664. | RRNSSIVGL |
| 2665. | RRNSSIVGM |
| 2666. | RRNsSIVGR |
| 2667. | RRNsSIVGY |
| 2668. | RRNsVFQQGF |
| 2669. | RRNsVFQQGK |
| 2670. | RRNSVFQQGL |
| 2671. | RRNsVFQQGM |
| 2672. | RRNsVFQQGR |
| 2673. | RRNsVFQQGY |
| 2674. | RRPKtLRL |
| 2675. | RRPsHEGYL |
| 2676. | RRPsIAPVL |
| 2677. | RRPsKPRLI |
| 2678. | RRPsLLSEF |
| 2679. | RRPsLQGNTL |
| 2680. | RRPsLVHGF |
| 2681. | RRPsLVHGK |
| 2682. | RRPSLVHGL |
| 2683. | RRPSLVHGM |
| 2684. | RRPsLVHGR |
| 2685. | RRPsLVHGY |
| 2686. | RRPsQNAISF |
| 2687. | RRPsQNAISFF |
| 2688. | RRPsQPYMF |
| 2689. | RRPsRPHMF |
| 2690. | RRPsRPHMFP |
| 2691. | RRPsVFERF |
| 2692. | RRPsVFERK |
| 2693. | RRPsVFERL |
| 2694. | RRPSVFERM |
| 2695. | RRPsVFERR |
| 2696. | RRPsVFERY |
| 2697. | RRPsYRKIF |
| 2698. | RRPsYRKIK |
| 2699. | RRPsYRKIL |
| 2700. | RRPSYRKIM |
| 2701. | RRPsYRKIR |
| 2702. | RRPsYRKIY |
| 2703. | RRPsYTLGF |
| 2704. | RRPsYTLGK |
| 2705. | RRPsYTLGL |
| 2706. | RRPsYTLGM |
| 2707. | RRPsYTLGR |
| 2708. | RRPsYTLGV |
| 2709. | RRPsYTLGY |
| 2710. | RRQsFAVLR |
| 2711. | RRQsKVEAL |
| 2712. | RRREDsYHV |
| 2713. | RRRsAPPEL |
| 2714. | RRRsAVHML |
| 2715. | RRRsLERLL |
| 2716. | RRSFsLE |
| 2717. | RRSsDIISL |
| 2718. | RRSsFLQ |
| 2719. | RRssFLQLF; RRSsFLQVF |
| 2720. | RRSSFLQVK |
| 2721. | RRSsFLQVL |
| 2722. | RRsSFLQVM; RRSSFLQVM; |
| | RRssFLQVM |
| 2723. | RRSSFLQVR |
| 2724. | RRssFLQVV |
| 2725. | RRSsFLQVY |
| 2726. | RRSsIGLRF |
| 2727. | RRSsIGLRK |
| 2728. | RRSsIGLRL |
| 2729. | RRSSIGLRM |
| | RRssVDLGF |
| 2730. | RRSsIGLRR |
| 2731. | RRSsIGLRV |
| 2732. | RRSsIGLRY |
| 2733. | RRsSIPITV; RRSsIPITV |
| 2734. | RRSsIQSTF; RRsSIQSTF; |
| | RRssIQSTF |
| 2735. | RRSsIQSTK |
| 2736. | RRSsIQSTL |
| 2737. | RRSsIQSTM |
| 2738. | RRSsIQSTR |
| 2739. | RRSsIQSTY |
| 2740. | RRSsISSWL |
| 2741. | RRSsLDAEIDSF |
| 2742. | RRSsLDAEIDSL |
| 2743. | RRSsLDAEIDSM |
| 2744. | RRSsLDAEIDSV |
| 2745. | RRSsLLSLM |
| 2746. | RRSsQSWSF; RRsSQSWSF; |
| | RRssQSWSF |
| 2747. | RRSsQSWSK |
| 2748. | RRSsQSWSL; RRSsQSwSL; |
| | RRsSQSWSL |
| 2749. | RRsSQSWSM |
| 2750. | RRSsQSWSR |
| 2751. | RRsSQSWSV |
| 2752. | RRSsQSWSY |
| 2753. | RRSsSVAQV |
| 2754. | RRSSTASLVKF |
| 2755. | RRSSTASLVKK |
| 2756. | RRSSTASLVKL |
| 2757. | RRSSTASLVKM |
| 2758. | RRSSTASLVKR |
| 2759. | RRSsVDLGF; RRsSVDLGF; |
| 2760. | RRSsVDLGK; RRsSVDLGK; |
| | RRssVDLGK |
| 2761. | RRSsVDLGL; RRsSVDLGL; |
| | RRssVDLGL |
| 2762. | RRSSVDLGM |
| 2763. | RRSsVDLGR; RRsSVDLGR; |
| | RRssVDLGR |
| 2764. | RRSsVDLGY; RRsSVDLGYI |
| | RRssVDLGY |
| 2765. | RRSsVKVEA |
| 2766. | RRSsVKVEF |
| 2767. | RRSsVKVEK |
| 2768. | RRSsVKVEL |
| 2769. | RRSSVKVEM |
| 2770. | RRSsVKVER |
| 2771. | RRSsVKVEY |
| 2772. | RRTSPITRF |
| 2773. | RRTSPITRK |
| 2774. | RRTSPITRL |
| 2775. | RRTSPITRM |
| 2776. | RRTSPITRR |
| 2777. | RRVsIGVQL |
| 2778. | RRVsPLNL |
| 2779. | RRVsPLNLSSVTP |
| 2780. | RRVsSNGIFDL |
| 2781. | RRVVQRSSF |
| 2782. | RRVVQRSsK |
| 2783. | RRVVQRSsL |
| 2784. | RRVVQRSSM |
| 2785. | RRVVQRSsR |
| 2786. | RRVVQRSsY |
| 2787. | RRYsASTVDVIEM |
| 2788. | RRYsDLTTL |
| 2789. | RRYsDPPTY |
| 2790. | RRYSGKTEF |
| 2791. | RRYSGKTEK |
| 2792. | RRYSGKTEL |
| 2793. | RRYSGKTER |
| 2794. | RRYSGKTEY |
| 2795. | RRYSGNMEF |
| 2796. | RRYSGNMEK |
| 2797. | RRYSGNMEL |
| 2798. | RRYSGNMEM |
| 2799. | RRYSGNMER |
| 2800. | RRYsKFFDL |
| 2801. | RRYsLPLKSIYM |
| 2802. | RRYsPPIER |
| 2803. | RRYsPPIQ |
| 2804. | RRYsPPIQF |
| 2805. | RRYsPPIQK |
| 2806. | RRYSPPIQL |
| 2807. | RRYSPPIQM |
| 2808. | RRYsPPIQR |
| 2809. | RRYsPPIQY |
| 2810. | RRYSRSPYSF |
| 2811. | RRYSRSPYSK |
| 2812. | RRYSRSPYSL |
| 2813. | RRYSRSPYSM |
| 2814. | RRYSRSPYSR |
| 2815. | RRYTNRVVTF |
| 2816. | RRYTNRVVTK |
| 2817. | RRYTNRVVTL |
| 2818. | RRYTNRVVTM |
| 2819. | RRYTNRVVTR |
| 2820. | RSAsFSRKV |
| 2821. | RSAsLAKL |
| 2822. | RSAsLAKLGY |
| 2823. | RSAsPDDDLGSSN |
| 2824. | RSAsPSSQGW |
| 2825. | RSAsPSSQGw |
| 2826. | RSAsPTVPR |
| 2827. | RSAsQERSL |
| 2828. | RSAsSATQVHK |
| 2829. | RSAsSATQVHY |
| 2830. | RSAsVGAEEY |
| 2831. | RSDSSQPML |
| 2832. | RSDSsQPML |
| 2833. | RSDssQPML |
| 2834. | RSDPSKsPGSLRY |
| 2835. | RSDsPKIDL |
| 2836. | RSDsPKIDY |
| 2837. | RSDsRAQAV |
| 2838. | RSDsRAQAY |
| 2839. | RSDsVGENL |
| 2840. | RSDsVGENY |
| 2841. | RSDsYVEL |
| 2842. | RSDsYVELSQY |
| 2843. | RSEPSKsPGSLRY |
| 2844. | RSEsKDRKF |
| 2845. | RSEsKDRKL |
| 2846. | RSEsKDRKM |
| 2847. | RSEsKDRKV |
| 2848. | RSEsPKIDL |
| 2849. | RSEsPKIDY |
| 2850. | RSEsPPAEL |
| 2851. | RSEsRAQAV |
| 2852. | RSEsRAQAY |
| 2853. | RSEsTENQSY |
| 2854. | RSEsVGENL |
| 2855. | RSEsVGENY |
| 2856. | RSEsYVELSQY |
| 2857. | RSFsGLIKR |
| 2858. | RSFsPTMKV |
| 2859. | RSFsVEREL |
| 2860. | RSFtPLSI |
| 2861. | RSFPLSILK |
| 2862. | RSGsLERKF |
| 2863. | RSGsLERKL |
| 2864. | RSGsLERKM |
| 2865. | RSGsLERKV |
| 2866. | RSHsPLRSK |
| 2867. | RSHsPMSNR |
| 2868. | RSHsPPLKL |
| 2869. | RSHSsPASL |
| 2870. | RSHsSPASL |
| 2871. | RSHSsPASL |
| 2872. | RSIsASDLTF |
| 2873. | RSIsNEGLTL |
| 2874. | RSIsSLLRF |
| 2875. | RSIsTPTCL; RSIsTPTcL; |
| | RSIsTPTc |
| 2876. | RSIsVGENL |
| 2877. | RSKsATLLY |
| 2878. | RSKsLTNLV |
| 2879. | RSKtPPKSY |
| 2880. | RSLsSGESL; RSLSsGESL; |
| | RSLssGESL |
| 2881. | RSLGsVQAPSY |
| 2882. | RSLsASPAL |
| 2883. | RSLsERLLQL |
| 2884. | RSLsESYEL |
| 2885. | RSLsFSDEM |
| 2886. | RSLsPFRRHSW; |
| | RSLsPFRRHsW; |
| | RSLsPFRRHsW |
| 2887. | RSLsPGGAA |
| 2888. | RSLsPGGAALGY |
| 2889. | RSLsPGGAF |
| 2890. | RSLsPGGAL |
| 2891. | RSLsPGGAM |
| 2892. | RSLsPGGAV |
| 2893. | RSLsPILPGR |
| 2894. | RSLsPLIKF |
| 2895. | RSLsPLLF |
| 2896. | RSLsPLLL |
| 2897. | RSLsPLLM |
| 2898. | RSLsPLLV |
| 2899. | RSLsPSSNSAF |
| 2900. | RSLsQELVGV |
| 2901. | RSLsRVRVL |
| 2902. | RSLsSYRGKY |
| 2903. | RSLsTTNVF |
| 2904. | RSLsVEIVK |
| 2905. | RSLsVEIVY |
| 2906. | RSLsVGSEF |
| 2907. | RSLsVPVDL |
| 2908. | RSLTHLsL |
| 2909. | RSLtHPPTI |
| 2910. | RSMsGGHGL |
| 2911. | RSMsMPVAH |
| 2912. | RSMsMPVAK |
| 2913. | RSNsLVSTF |
| 2914. | RSNsPLPSI |
| 2915. | RsPEDEYELLMPHRISSH |
| | RssSFVLPKL; RsSsFVLPKL; |
| | RSSSFVLPKL; RSSSFVLPKL; |
| | RSSSFVLPKL |
| 2916. | RsPEPDPYLSY |
| 2917. | RSPsFNMQL |
| 2918. | RSPsKPTLAY |
| 2919. | RSPsPKTSL |
| 2920. | RSPsPSFRWPF |
| 2921. | RSPsPTLSYY |
| 2922. | RsPTKSSLDY |
| 2923. | RsPTKSSLDYR |
| 2924. | RSRPALsPL |
| 2925. | RSRRsPLLK |
| 2926. | RSRRsPLLY |
| 2927. | RSRsPLEL |
| 2928. | RSRsPLGFY |
| 2929. | RSRsPPPVS |
| 2930. | RSRsPPPVSK |
| 2931. | RSRsPPPVSY |
| 2932. | RSRsPRPAF |
| 2933. | RSRsPRPAL |
| 2934. | RSRsPRPAM |
| 2935. | RSRsPRPAV |
| 2936. | RSRsRDRMY |
| 2937. | RSRsVPVSF |
| 2938. | RSRsYsPRRY |
| 2939. | RSRsYTPEY |
| 2940. | RSRTsPITRR |
| 2941. | RSRTsPITRY |
| 2942. | RsSFLQVF |
| 2943. | RSSPRTIsF |
| 2944. | RSSQFGsLEF |
| 2945. | RSSsAPLGL |
| 2946. | RSSsFKDFAK |
| 2947. | RSSsFSDTL |
| 2948. | RsSSFVLPKL; RSsSFVLPKL; |
| 2949. | RSSSLIRHK |
| 2950. | RSSSLIRHY |
| 2951. | RSSsLQRRV |
| 2952. | RsSSLSDFSW; |
| | RSsSLSDFSW; |
| | RSSsLSDFSW; RssSLSDFSW; |
| | RsSsLSDFSW; RSssLSDFSW; |
| | RsssLSDFSW |
| 2953. | RsSSPFLSK; RSsSPFLSK; |
| | RSSsPFLSK; RssSPFLSK; |
| | RsSsPFLSK; RSssPFLSK; |
| | RsssPFLSK |
| 2954. | RSSsPLQL |
| 2955. | RSSsPPILTK |
| 2956. | RSSsPVTEL |
| 2957. | RSStPLPTI |
| 2958. | RSTsLSLKY |
| 2959. | RSVsGFLHF |
| 2960. | RSVsLDSQM |
| 2961. | RSVsLDSQMGY |
| 2962. | RSVsLSMRK |
| 2963. | RSVsLSMRY |
| 2964. | RSVsPTFL |
| 2965. | RSVsPVQDL |
| 2966. | RsWKYNQSISLRRP |
| 2967. | RSWsPPPEV |
| 2968. | RSWsPPPEVSR |
| 2969. | RSYsDPPLKF |
| 2970. | RSYsGSRsK |
| 2971. | RSYGSRSR |
| 2972. | RSYSGSRSR |
| 2973. | RSYsGSRsY |
| 2974. | RSYsPDHRQK |
| 2975. | RSYsPDHRQY |
| 2976. | RSYsPERSK |
| 2977. | RSYsPERSKSY |
| 2978. | RSYsPERSKSYSF |
| 2979. | RSYsPERSY |
| 2980. | RSYsPRNSR |
| 2981. | RSYsPRNSY |
| 2982. | RSYSRsFSK |
| 2983. | RSYsRSFSR |
| 2984. | RSYSRsFSY |
| 2985. | RSYsYPRQK |
| 2986. | RSYsYPRQY |
| 2987. | RSYVTTSTRTYsLG |
| 2988. | RTsSFALNL; RTSsFALNL; |
| | RTssFALNL |
| 2989. | RTAsFAVRK |
| 2990. | RTAsFAVRY |
| 2991. | RTASLIIKV |
| 2992. | RTAsLSNQEcQLY |
| 2993. | RTAsLVSGL |
| 2994. | RTAsPPALPK |
| 2995. | RTAsPPPPPK |
| 2996. | RTAtADDKKLQF |
| 2997. | RTDPSKsPGSLRY |
| 2998. | RTDsIGEKL |
| 2999. | RTDsIGEKLGRY |
| 3000. | RTDsPKIDL |
| 3001. | RTDsPKIDY |
| 3002. | RTDsRAQAV |
| 3003. | RTDsRAQAY |
| 3004. | RTDsREQKL |
| 3005. | RTDSRGVNL |
| 3006. | RTDsYVELSQY |
| 3007. | RTEPSKsPGSLRY |
| 3008. | RTEsDSGLKF |
| 3009. | RTEsDSGLKK |
| 3010. | RTEsDSGLKL |
| 3011. | RTEsDSGLKM |
| 3012. | RTEsDSGLKV |
| 3013. | RTEsPKIDL |
| 3014. | RTEsPKIDY |
| 3015. | RTEsRAQAV |
| 3016. | RTEsRAQAY |
| 3017. | RTEsYVELSQY |
| 3018. | RTFsDESNVL |
| 3019. | RTFsESSVW |
| 3020. | RTFsLDTIL |
| 3021. | RTFsPTY |
| 3022. | RTFsPTYGF |
| 3023. | RTFsPTYGL |
| 3024. | RTFsPTYGLLR |
| 3025. | RTFsPTYGM |
| 3026. | RTFsPTYGV |
| 3027. | RTFsYIKNK |
| 3028. | RTGsPALGL |
| 3029. | RTHsLLLLL |
| 3030. | RTIsAQDTLAY |
| 3031. | RTIsNPEVVMK |
| 3032. | RTIsPPTLGTL |
| 3033. | RTIsQSSSL |
| 3034. | RtISVILFL; RTIsVILFL; |
| | RtIsVILFL |
| 3035. | RTLsHISEA |
| 3036. | RTLsHISEV |
| 3037. | RTLsMDKGF |
| 3038. | RTLsPEIITV |
| 3039. | RTLsPSSGY |
| 3040. | RTLsVESLI |
| 3041. | RTMsEAALVRK |
| 3042. | RTMsPIQVL |
| 3043. | RTNsPGFQK |
| 3044. | RTPsDVKEL |
| 3045. | RTPsFLKKNK |
| 3046. | RTPsFLKKNY |
| 3047. | RTPsISFHH |
| 3048. | RTPsPARPAL |
| 3049. | RTPsPKSLPSYL |
| 3050. | RTPsQIIRK |
| 3051. | RTPsSSSTLAY |
| 3052. | RTRsLPITI |
| 3053. | RTRsLSSLREK |
| 3054. | RTRsLSSLREY |
| 3055. | RTRsPSPTF |
| 3056. | RTRsPSPTL |
| 3057. | RTRsPSPTM |
| 3058. | RTRsPSPTV |
| 3059. | RTSsFALNL |
| 3060. | RTSsFTEQL |
| 3061. | RTSSFtFQN; RTSsFTFQN; |
| | RTSsFtFQN |
| 3062. | RTSsPLFNK |
| 3063. | RTSsQRSTLTY |
| 3064. | RTVsPAHVL |
| 3065. | RTVsPELIL |
| 3066. | RTYKsPLRH |
| 3067. | RTYKsPLRK |
| 3068. | RTYKsPLRY |
| 3069. | RTYSGPMNK |
| 3070. | RTYSGPMNKV |
| 3071. | RTYsHGTYR |
| 3072. | RTYsLGSAL |
| 3073. | RVAsFAVRK |
| 3074. | RVAsFAVRY |
| 3075. | RVAsPLVHK |
| 3076. | RVAsPLVHY |
| 3077. | RVAsPPPPPK |
| 3078. | RVAsPPPPPY |
| 3079. | RVAsPSRKV |
| 3080. | RVAsPTSGV |
| 3081. | RVAsPTSGVK |
| 3082. | RVAsPTSGVKK |
| 3083. | RVAsPTSGVKR |
| 3084. | RVAsPTSGVY |
| 3085. | RVAsWAVSF |
| 3086. | RVDsLEFSL |
| 3087. | RVDsPSHGL |
| 3088. | RVDsPVTV |
| 3089. | RVDsTTcLF |
| 3090. | RVGsLVLNL |
| 3091. | RVISGVLQL |
| 3092. | RVKLPsGSKK |
| 3093. | RVKsPGsGHVK |
| 3094. | RVKsPGsGHVY |
| 3095. | RVKsPISLK |
| 3096. | RVKsPSPKSER |
| 3097. | RVKsPSPKSEY |
| 3098. | RVKsWADNL |
| 3099. | RVKtPTSQSYK |
| 3100. | RVKtPTSQSYR |
| 3101. | RVKtPTSQSYY |
| 3102. | RVKTtPLRR |
| 3103. | RVKTtPLRY |
| 3104. | RVKVDGPRSPsY |
| 3105. | RVLDRSPsRSAK |
| 3106. | RVLDRSPsRSAY |
| 3107. | RVLHsPPAV |
| 3108. | RVLsGVVTK |
| 3109. | RVLsPLIIK |
| 31I0. | RVMsSPSAMK |
| 311I. | RVMSsPSAMK |
| 3112. | RVMssPSAMK |
| 3113. | RVPsINQKI |
| 3114. | RVPsKsLDL; RVPsKSLDL; |
| | RVPSKsLDL |
| 3115. | RVPsLLVLL |
| 3116. | RVPsPTPAPK |
| 3117. | RVPsSTLKK |
| 3118. | RVPsSTLKY |
| 3119. | RVRKLPsTTL |
| 3120. | RVRQsPLATK |
| 3121. | RVRQsPLATR |
| 3122. | RVRQsPLATY |
| 3123. | RVRRsSFLNAK; |
| | RVRRSSFLNAK; |
| | RVRRssFLNAK; |
| | RVRRSSFLNAK |
| 3124. | RVRsLSSLREK |
| 3125. | RVRsLSSLREY |
| 3126. | RVRsPTRSF |
| 3127. | RVRsPTRSL |
| 3128. | RVRsPTRSM |
| 3129. | RVRsPTRSP |
| 3130. | RVRsPTRSV |
| 3131. | RVSSLTLHL |
| 3132. | RVSsPISKK |
| 3133. | RVSsPISKY |
| 3134. | RVSsPLASF |
| 3135. | RVSsRFSSK |
| 3136. | RVSsRFSSR |
| 3137. | RVSsRFSSY |
| 3138. | RVSsVKLISK |
| 3139. | RVSsVKLISY |
| 3140. | RVTsAEIKL |
| 3141. | RVVPsPLQF |
| 3142. | RVVsLSMRK |
| 3143. | RVVsLSMRY |
| 3144. | RVVsPGIDL |
| 3145. | RVWEDRPsSA; |
| | RVWEDRPSsA; |
| | RVWEDRPssA |
| 3146. | RVWEDRPSsA |
| 3147. | RVWsPPRVHKV |
| 3148. | RVYQyIQSR |
| 3149. | RVYQyIQSRFK |
| 3150. | RVYQyIQSRFY |
| 3151. | RVYQyIQSRK |
| 3152. | RVYQyIQSRY |
| 3153. | RVYsPYNHK |
| 3154. | RVYsPYNHR |
| 3155. | RVYsPYNHY |
| 3156. | RVYSRsFSK |
| 3157. | RVYSRsFSY |
| 3158. | RVYTyIQSRF |
| 3159. | RYLGGsMDLSTF |
| 3160. | RYPsNLQLF |
| 3161. | RYPtSIASL |
| 3162. | RYQtQPVTL |
| 3163. | RYRsPEPDPYLSY |
| 3164. | SAARESHPHGVKRS |
| | AsPDDDLG |
| 3165. | SAAsPVVSSM |
| 3166. | SAEsKTIEF |
| 3167. | SAGGsAEALLSDLH |
| 3168. | SAGGsAEALLSDLHAF |
| 3169. | SAIsPKSSL |
| 3170. | SAIsPTPEI |
| 3171. | SAKsPLPSY |
| 3172. | SAMsPTHHL |
| 3173. | SAQGSDVsLTA |
| 3174. | SARGsPTRPNPPVR |
| 3175. | SAYGGLTsPGLS |
| 3176. | SAYGGLTsPGLSY |
| 3177. | SAYGGLTsPGLSYSL |
| 3178. | SDDEKMPDLE |
| 3179. | sDFHAERAAREK |
| 3180. | SDMPRAHsF |
| 3181. | SDSAQGSESHsL |
| 3182. | SDsPPRPQPAF |
| 3183. | SDsPPRPQPAFKYQ |
| 3184. | SDYAVHPMsPVGRTS |
| 3185. | SEAsPSREA |
| 3186. | SEAsPSREAI |
| 3187. | SEDsSRGAF; SEDSsRGAF; |
| | SEDssRGAF |
| 3188. | SEFKAMDsI |
| 3189. | SEFTGFSGMsF |
| 3190. | SEGsLDRLY |
| 3191. | SEGsLHRKF |
| 3192. | SEGsLHRKW |
| 3193. | SEGsLHRKY |
| 3194. | SELsPGRSV; SELsPGRSV |
| 3195. | SELtPSESL |
| 3196. | SERIMQLsL |
| 3197. | SESKsMPVL |
| 3198. | SEVsPSGVGF |
| 3199. | SEYQWITsP |
| 3200. | SFDdGSVRL |
| 3201. | SFDsGIAGL |
| 3202. | SFDsGSVRL; SFDsGsVRL; |
| | SFDSGsVRL |
| 3203. | SFLPRTLsL |
| 3204. | SGGAQsPLRYLHVL |
| 3205. | sGGDDDWTHLSSKEVDPST |
| 3206. | sGGDDDWTHLS |
| | SKEVDPSTG |
| 3207. | sGGDDDWTHLSSKEVDPST |
| | GE |
| 3208. | sGGDDDWTHLSSK |
| | EVDPSTGEL |
| 3209. | sGGDDDWTHLSSKEVDPST |
| | GELQ |
| 3210. | SGPEIFTF |
| 3211. | SGPKPLFRRMsSLVGPTQ |
| 3212. | SIDdPQKL |
| 3213. | SIDsPEKL |
| 3214. | SIDsPQKL |
| 3215. | sIELPSM |
| 3216. | SIGsPVKVGK |
| 3217. | sIISPDFSF; sIIsPDFSF; |
| | SIIsPNFSF |
| 3218. | SILsFVSGL |
| 3219. | SILsRTPSV |
| 3220. | SIMsFHIDL |
| 3221. | SIMsPEIQL |
| 3222. | SIPsGYLEL |
| 3223. | SIPtVSGQI |
| 3224. | SIRYSGHsL |
| 3225. | SISsIDREL |
| 3226. | SISsMEVNV |
| 3227. | SISStPPAV |
| 3228. | SISsVSNTF |
| 3229. | SITItPPDRYDSL |
| 3230. | SKEDKNGHDGDTHQEDDG |
| | EKsD |
| 3231. | SKSPSLSPSPPsPLEKTPL |
| 3232. | SKtVATFIL |
| 3233. | SLsSPTVTL; SLSsPTVTL; |
| | SLssPTVTL |
| 3234. | SLAsLLAKV |
| 3235. | SLAsLTEKI |
| 3236. | SLDsSNSGF; SLDSsNSGF; |
| | SLDssNSGF |
| 3237. | SLDSEDYsL |
| 3238. | SLDsLDLRV |
| 3239. | SLDsLGDVFL |
| 3240. | SLDsPGPEKM |
| 3241. | SLDsPGPEKMAL |
| 3242. | SLDsPSYVLY |
| 3243. | SLDsQQDSMKY; |
| | SLDSQQDsMKY |
| 3244. | SLEEPKQANGGAY |
| 3245. | SLEsPSYVLY |
| 3246. | SLFGGsVKL |
| 3247. | SLFKRLYsL |
| 3248. | SLFsGDEENA |
| 3249. | SLFsGSYSSL |
| 3250. | SLFsPQNTL |
| 3251. | SLFsPRRNK |
| 3252. | SLFsPRRNY |
| 3253. | SLFsSEESNL |
| 3254. | SLFSSEESNLGA |
| 3255. | SLGPIRsL |
| 3256. | SLHDIQLsL |
| 3257. | SLHsLGSVSL |
| 3258. | SLIDGyYRL |
| 3259. | SLKsPVTVK |
| 3260. | SLLAsPGHISV |
| 3261. | SLLHTSRSL |
| 3262. | SLLNKSSPVK |
| 3263. | SLLNKSsPVKK |
| 3264. | SLLNKSSPVKY |
| 3265. | SLLsELQHA |
| 3266. | SLLsLHVDL |
| 3267. | SLLsLQTEL |
| 3268. | SLLsVSHAL |
| 3269. | SLLTsPPKA |
| 3270. | SLLTsPPKV |
| 3271. | SLMsGTLESL |
| 3272. | SLMsPGRRK |
| 3273. | SLMsPGRRY |
| 3274. | SLMtISHPGL; SLMTIsHPGL; |
| | SLMtIsHPGL |
| 3275. | SLNSsPVSK |
| 3276. | SLQPRSHsV |
| 3277. | SLQsLETSV |
| 3278. | SLRRsVLMK |
| 3279. | SLRRsVLMY |
| 3280. | SLSsERYYL |
| 3281. | SLSsLLVKL |
| 3282. | SLtRSPPRV; SLTRsPPRV; |
| | SLtRsPPRV |
| 3283. | SLVDGyFRL |
| 3284. | SLYDRPAsY |
| 3285. | SLYsPVKKK |
| 3286. | SMFsPRRNK |
| 3287. | SMKsPLYLVSR |
| 3288. | SMKsPVTVK |
| 3289. | SMLNKSSPVK |
| 3290. | SMLNKSsPVKK |
| 3291. | SMLsQEIQTL |
| 3292. | SMLTsPPKA |
| 3293. | SMLTsPPKV |
| 3294. | SMMsPGRRK |
| 3295. | SMQPRSHsV |
| 3296. | SMRRsVLMK |
| 3297. | SMSsLSREV |
| 3298. | SMTRsPPRV |
| 3299. | SMYsPVKKK |
| 3300. | SNFKsPVKTIR |
| 3301. | SPSSPSVRRQL |
| 3302. | SPAASISRLsGEQVDGKG |
| 3303. | SPAsPKISF |
| 3304. | SPAsPKISL |
| 3305. | SPAsPKISM |
| 3306. | SPAsPKISV |
| 3307. | SPAsPLKEL |
| 3308. | SPDsSQSSL; SPDSsQSSL; |
| | SPDssQSSL |
| 3309. | SPDHSDHtL |
| 3310. | SPDsSQSSL |
| 3311. | sPEDEYELLMPHRISSH; |
| | SPEDEYELLMPHRIsSH; |
| | sPEDEYELLMPHRIsSH |
| 3312. | SPEKAGRRsSF |
| 3313. | SPEKAGRRsSL |
| 3314. | SPEKAGRRsSM |
| 3315. | SPEKAGRRsSV |
| 3316. | SPERPFLAILGGAKVADK |
| 3317. | SPERPFLAILGGAKVADKIQ |
| 3318. | SPFKRQLsF |
| 3319. | SPFKRQLsL |
| 3320. | SPFKRQLsM |
| 3321. | SPFKRQLsV |
| 3322. | SPFLSKRsL; SPFLsKRSL; |
| | SPFLsKRsL |
| 3323. | SPFSSRSPsL |
| 3324. | SPGLARKRsF |
| 3325. | SPGLARKRsL |
| 3326. | SPGLARKRsM |
| 3327. | SPGLARKRsV |
| 3328. | SPGsPRPAF |
| 3329. | SPGsPRPAL |
| 3330. | SPGsPRPAM |
| 3331. | SPGsPRPAV |
| 3332. | SPHsPFYQL |
| 3333. | SPHYFSPFRPY |
| 3334. | SPIAPRsPAKL |
| 3335. | SPIKVTL |
| 3336. | SPKPPTRsP |
| 3337. | SPKSGsPKSSSL |
| 3338. | SPKsPGLKA |
| 3339. | SPKsPGLKAM |
| 3340. | SPKsPGLKF |
| 3341. | SPKsPGLKL |
| 3342. | SPKsPGLKM |
| 3343. | SPKsPGLKV |
| 3344. | SPKsPTAAF |
| 3345. | SPKsPTAAL |
| 3346. | SPKsPTAAM |
| 3347. | SPKsPTAAV |
| 3348. | SPLsKIGIEL |
| 3349. | SPLsPTETF |
| 3350. | SPLTKSIsL |
| 3351. | SPPDsPGRTL |
| 3352. | sPPFPVPVYTRQAPKQVIK |
| 3353. | SPPsPARWSL |
| 3354. | SPPsPLEKTPL |
| 3355. | SPRAPVsPLKF |
| 3356. | SPRERsPAL |
| 3357. | SPRGEASsL |
| 3358. | SPRGSGsSTSL |
| 3359. | SPRLPRsPRL |
| 3360. | SPRPPNsPSI |
| 3361. | SPRPPNsPSISI |
| 3362. | SPRRsLGLAL |
| 3363. | SPRRsRSISF |
| 3364. | SPRRsRSISL |
| 3365. | SPRRsRSISM |
| 3366. | SPRRsRSISV |
| 3367. | SPRsESGGL |
| 3368. | SPRsITSTF |
| 3369. | SPRsITSTL |
| 3370. | SPRsITSTM |
| 3371. | SPRsITSTP |
| 3372. | SPRsITSTV |
| 3373. | SPRsPDRTL |
| 3374. | SPRsPGKPF |
| 3375. | SPRsPGKPL |
| 3376. | SPRsPGKPM |
| 3377. | SPRsPGKPV |
| 3378. | SPRsPGPLPGARGL |
| 3379. | SPRsPGRSF |
| 3380. | SPRsPGRSL |
| 3381. | SPRsPGRSM |
| 3382. | SPRsPGRSV |
| 3383. | SPRsPISPEL |
| 3384. | SPRsPSGLR |
| 3385. | SPRsPSTTYF |
| 3386. | SPRsPSTTYL |
| 3387. | SPRsPSTTYM |
| 3388. | SPRsPSTTYV |
| 3389. | SPRsPTPSY; SPRSPtPSY; |
| | SPRsPtPSY |
| 3390. | SPRsPVPTTL |
| 3391. | SPRssQLV |
| 3392. | SPRtPPQRF |
| 3393. | SPRtPSNTP |
| 3394. | SPRTPtPFKHAL |
| 3395. | SPRTPVsPVKF; |
| | SPRtPVSPVKF; |
| | SPRTPVSPVKF; |
| | SPRtPVSPVKF; |
| | SPRtPVsPVKF |
| 3396. | SPRtPVSPVKL; |
| | SPRTPVSPVKL; |
| | SPRtPVsPVKL |
| 3397. | SPRtPVSPVKM; |
| | SPRTPVSPVKM; |
| | SPRtPVsPVKM |
| 3398. | SPRtPVSPVKV; |
| | SPRTPVsPVKV; |
| | SPRtPVsPVKV |
| 3399. | SPsFGDPQL |
| 3400. | SPSKSPSLSPSPPsPLEKTPL |
| 3401. | SPSLSPSPPsPLEKTPL |
| 3402. | SPSsPRVRL |
| 3403. | SPSsPSVRRQF |
| 3404. | SPSsPSVRRQL |
| 3405. | SPSsPSVRRQM |
| 3406. | SPSsPSVRRQV |
| 3407. | SPSTSRSGGsSRF |
| 3408. | SPSTSRSGGsSRL |
| 3409. | SPSTSRSGGsSRM |
| 3410. | SPSTSRSGGsSRV |
| 3411. | sPTRPNPPVRNLH |
| 3412. | SPTsPFSSL |
| 3413. | SPVNKVRRVSF |
| 3414. | SPVsPMKEL |
| 3415. | SPVVHQsF |
| 3416. | SPVVHQsL |
| 3417. | SPVVHQsM |
| 3418. | SPVVHQsV |
| 3419. | SQAASSDSAQGSDVsLTA |
| 3420. | SQDsPRKL |
| 3421. | SQILRTPsL |
| 3422. | SQIsPKSWGV |
| 3423. | SRsSSVLsL; SRSsSVLsL; |
| | SRSSsVLsL; SRsSsVLsL; |
| | SRSssVLsL; SRssSVLsL; |
| | SRsssVLSL |
| 3424. | SRDKHsEY |
| 3425. | SREKHsEI |
| 3426. | SRFNRRVsV |
| 3427. | SRHsGPFFTF |
| 3428. | SRIPLVRsF |
| 3429. | SRKsFVFEL |
| 3430. | SRLSLRRSL; SRLSLRRsL; |
| | SRLsLRRsL |
| 3431. | SRLTHLsF |
| 3432. | SRLTHLsK |
| 3433. | SRLTHLsL |
| 3434. | SRLTHLSM |
| 3435. | SRLTHLsR |
| 3436. | SRLTHLsY |
| 3437. | SRMsPKAQF |
| 3438. | SRMsPKAQK |
| 3439. | SRMsPKAQL |
| 3440. | SRMSPKAQM |
| 3441. | SRMsPKAQR |
| 3442. | SRMsPKAQY |
| 3443. | SRNQsPQRL |
| 3444. | SRPsMsPTPL |
| 3445. | SRPsSSRSY; SRPSsSRSY; |
| | SRPSSsRSY; SRPssSRSY; |
| | SRPSssRSY; SRPsSsRSY; |
| | SRPsssRSY |
| 3446. | SRSSSVLsL |
| 3447. | SRTsPITRF |
| 3448. | SRTsPITRK |
| 3449. | SRTsPITRL |
| 3450. | SRTSPITRM |
| 3451. | SRTsPITRR |
| 3452. | SRTsPITRY |
| 3453. | SRWsGSHQF |
| 3454. | SRWsGSHQK |
| 3455. | SRWsGSHQR |
| 3456. | SRWsGSHQY |
| 3457. | SRYsGVNQSM |
| 3458. | SRYSRsPYSF; SRYsRSPYSF; |
| | SRYsRsPYSF |
| 3459. | SRYSRsPYSK; |
| | SRYsRSPYSK; SRYsRsPYSK |
| 3460. | SRYSRsPYSL; SRYsRSPYSL; |
| | SRYsRsPYSL |
| 3461. | SRYSRsPYSM; |
| | SRYsRSPYSM; SRYsRsPYSM |
| 3462. | SRYSRsPYSR; SRYsRSPYSR; |
| | SRYsRsPYSR |
| 3463. | SRYSRsPYSY; |
| | SRYsRSPYSY; SRYsRsPYSY |
| 3464. | SSAVDtLRS |
| 3465. | SSDIsPTRL |
| 3466. | SSDIsPTRY |
| 3467. | SSDKHsEY |
| 3468. | SSDPASQLsY; |
| | SSDPAsQLSY; SSDPAsQLsY |
| 3469. | SSDSAQGSDVsLTA |
| 3470. | SSDsETLRY |
| 3471. | SSDsPPRPQPAF |
| 3472. | SSDsPQKL |
| 3473. | SSDsPQKY |
| 3474. | SSDsPSYVLY |
| 3475. | SSDsPTNHF |
| 3476. | SSDsPTNHFF |
| 3477. | SSEIsPTRY |
| 3478. | SSEKHsEY |
| 3479. | SSEPASQLsY |
| 3480. | SSEsETLRY |
| 3481. | SSEsPQKL |
| 3482. | SSEsPQKY |
| 3483. | SSEsPSYVLY |
| 3484. | SSEsPTNHFY |
| 3485. | SSGRsPSKAVAAR |
| 3486. | SSIPSTLsL |
| 3487. | SSIsPVRL |
| 3488. | SsLPRYLGL |
| 3489. | SSMKsPLYL |
| 3490. | SSMsPLPQM |
| 3491. | SSNGKMASRRsEEKEAG |
| 3492. | SSNGKMASRRsEEKEAGEI |
| 3493. | SsPEFFM |
| 3494. | SsPIMRKKVSL |
| 3495. | sSPPFPVPVYTRQAPKQVIK |
| 3496. | SSPRsPTTTL |
| 3497. | SSSGsPHLY |
| 3498. | SSsPTHAKSAHV |
| 3499. | SSSSSGsPHLY |
| 3500. | SSsWRILGSKQSEHRP |
| 3501. | SsVPGVRLL |
| 3502. | SsVPGVRLLQ |
| 3503. | SsVPGVRLLQD |
| 3504. | SsVPGVRLLQDSVD; |
| | SSVPGVRLLQDsVD; |
| | SsVPGVRLLQDsVD |
| 3505. | SSVsPAVSK |
| 3506. | SSYPRPLtY |
| 3507. | STDIsPTRL |
| 3508. | STDIsPTRY |
| 3509. | STDKHsEY |
| 3510. | STDPASQLsY |
| 3511. | STDsETLRY |
| 3512. | STDsGLGLGcY |
| 3513. | STDsPQKY |
| 3514. | STDsPRLL |
| 3515. | STDsPSYVLY |
| 3516. | STDsPTNHFY |
| 3517. | STEIsPTRL |
| 3518. | STEIsPTRY |
| 3519. | STEKHsEY |
| 3520. | STEPASQLsY |
| 3521. | STEsETLRY |
| 3522. | STEsPQKY |
| 3523. | STEsPSYVLY |
| 3524. | STEsPTNHFY |
| 3525. | STFsTNYRSL |
| 3526. | STIAILNsV |
| 3527. | STIQNsPTKK; sTIQNSPTKK |
| 3528. | STIsLVTGETER |
| 3529. | STIsPSGAFG |
| 3530. | STIsPSGAFGLF |
| 3531. | STKsTELLL |
| 3532. | STLLAsPMLK |
| 3533. | STMsLNIITV; sTMSLNIITV; |
| | sTMsLNIITV |
| 3534. | STPsGYLEL |
| 3535. | SVsSLEVHF; SVSsLEVHF; |
| | SVssLEVHF |
| 3536. | SVAsPLTL |
| 3537. | SVDIsPTRL |
| 3538. | SVDIsPTRY |
| 3539. | SVFRHFGsFQK |
| 3540. | SVFsPSFGL |
| 3541. | SVGsDDELGPIR |
| 3542. | SVGsDYYIQL |
| | SYSFSsSSIGH; |
| | SYSFSSsSIGH; |
| | SYSFSSSsIGH; |
| | SYSFssSSIGH; SYSFsSsSIGH; |
| | SYSFSssSIGH; SYSFSsSsIGH; |
| | SYSFsssSIGH; SYSFssSsIGH; |
| | SYSFsSssIGH; SYSFSsssIGH; |
| | SYSFssssIGH |
| 3543. | sVINVFVGR |
| 3544. | SVIsDDSVL |
| 3545. | SVIsQERLSY |
| 3546. | SVIs; SVKPRRTsL; |
| | SVKsPEVQLL |
| 3547. | SVKsPVTVK |
| 3548. | SVKsPVTVY |
| 3549. | SVLPRALSL |
| 3550. | SVLsPSFQL |
| 3551. | SVLsYTSVR |
| 3552. | SVLVRQISL |
| 3553. | SVMDsPKKL |
| 3554. | SVMQSPLVGV |
| 3555. | SVPGVRLLQDsVD |
| 3556. | SVQsDQGYISR |
| 3557. | SVRRsVLMK |
| 3558. | SVRRsVLMY |
| 3559. | SVRsLSLSL |
| 3560. | SVRsPTPYK; SVRSPtPYK; |
| | SVRsPtPYK |
| 3561. | SVSRsPVPEK |
| 3562. | SVSsLEVHF |
| 3563. | SVSsSSYR |
| 3564. | SVTsPIKMK |
| 3565. | SVYsGDFGNLEV |
| 3566. | SVYsPVKKK |
| 3567. | SVYsPVKKY |
| 3568. | sYIEHIFEI |
| 3569. | SYMGHFDLL |
| 3570. | SYPsPVATSY |
| 3571. | SYPsPVPTSF |
| 3572. | sYQKVIELF |
| 3573. | SYSFsSSSIGH; |
| 3574. | SYSYSFsSSSIGH; |
| | SYSYSFSsSSIGH; |
| | SYSYSFSSsSIGH; |
| | SYSYSFSSSsIGH; |
| | SYSYSFssSSIGH; |
| | SYSYSFsSsSIGH; |
| | SYSYSFSssSIGH; |
| | SYSYSFSsSsIGH; |
| | SYSYSFsssSIGH; |
| | SYSYSFssSsIGH; |
| | SYSYSFsSssIGH; |
| | SYSYSFSsssIGH; |
| | SYSYSFssssIGH |
| 3575. | SYYsLPRSF |
| 3576. | SYYsPSIGF |
| 3577. | SYYsPSIGFSY |
| 3578. | TAIsPPLSV |
| 3579. | TAPLVPPLsPQY |
| 3580. | TASPVAVsL |
| 3581. | TATsPLTSY |
| 3582. | TDKYsKMM |
| 3583. | TEAsPESML |
| 3584. | TEDsNLRLF |
| 3585. | TELPKRLsL |
| 3586. | TEPLPEKTQEsL |
| 3587. | TESsPGSRQIQLW |
| 3588. | THKGEIRGASTPFQFRASSP |
| 3589. | THsLLLLL; tHSLLLLL; |
| | tHsLLLLL |
| 3590. | TIGEKKEPsDKSVDS |
| 3591. | TIRsPTTVL |
| 3592. | TItPPDRYDSL |
| 3593. | TKDKYMASRGQKAKsMEG |
| 3594. | TKsVKALSSLHGDD |
| 3595. | TKsVKALSSLHGDDQ |
| 3596. | TKsVKALSSLHGDDQD |
| 3597. | TLAsPSVFK |
| 3598. | TLAsPSVFKST |
| 3599. | TLAsPSVFKSV |
| 3600. | TLDsLDFARY |
| 3601. | TLEsTTVGTSV; |
| | TLEStTVGTSV; |
| | TLESTtVGTSV; |
| | TLEstTVGTSV; |
| | TLEsTtVGTSV; |
| | TLESttVGTSV; TLEsttVGTSV |
| 3602. | TLLAsPMLK |
| 3603. | TLLsPSSIKV |
| 3604. | TLMERTVsL |
| 3605. | TLSsIRHMI |
| 3606. | TLSsPPPGL |
| 3607. | TMAsPGKDNY |
| 3608. | TMAsPSVFKST |
| 3609. | TMAsPSVFKSV |
| 3610. | TMDsPGKDNY |
| 3611. | TMEsPGKDNY |
| 3612. | TMFLRETsL |
| 3613. | TMMsPSQFL |
| 3614. | TPAPSRTAsF |
| 3615. | TPAQPQRRsF |
| 3616. | TPAQPQRRsL |
| 3617. | TPAQPQRRsM |
| 3618. | TPAQPQRRsV |
| 3619. | TPAsPNREL |
| 3620. | TPASsRAQTL |
| 3621. | TPASSSSAL |
| 3622. | TPAtPTSQF |
| 3623. | TPDPSKFFSQLsSEHGGDV |
| 3624. | tPDPSKFFSQLSSEHGGDVQ |
| 3625. | TPHtPKSLL |
| 3626. | TPIsPGRASGF |
| 3627. | TPIsPGRASGM |
| 3628. | TPIsPGRASGMTTL |
| 3629. | TPIsPGRASGV |
| 3630. | TPIsPLKTGV |
| 3631. | TPIsQAQKL |
| 3632. | TPKsPGASNF |
| 3633. | TPMKKHLsL |
| 3634. | TPPPPPDtPP |
| 3635. | TPPSSEKLVSVM; |
| | TPPSSEKLVSVM; |
| | TPPssEKLVSVM |
| 3636. | TPQPSRPVsPA |
| 3637. | TPQPSRPVsPAG |
| 3638. | TPRPAsPGPSL |
| 3639. | TPRsPPLGF |
| 3640. | TPRsPPLGL |
| 3641. | TPRsPPLGLF |
| 3642. | TPRsPPLGLI |
| 3643. | TPRsPPLGLL |
| 3644. | TPRsPPLGLM |
| 3645. | TPRsPPLGLV |
| 3646. | TPRsPPLGM |
| 3647. | TPRsPPLGV |
| 3648. | TPRtPRTPQL; TPRTPRtPQL; |
| | TPRtPRtPQL |
| 3649. | TPsPARPAL |
| 3650. | TPSsFDTHF |
| 3651. | TPSsREGTL |
| 3652. | TPVsPGSTF |
| 3653. | TPVsPRLHV |
| 3654. | tPVSPTASM |
| 3655. | TPVsPVKF |
| 3656. | TPVsSANMM |
| 3657. | TRDsLLIHL |
| 3658. | TRKTPEsFL; TRKtPESFL; |
| | TRKtPEsFL |
| 3659. | TRLsPAKIVLF |
| 3660. | TRLsPAKIVLK |
| 3661. | TRLsPAKIVLR |
| 3662. | TRLsPAKIVLY |
| 3663. | TRLsPLEL |
| 3664. | TRMsTVSEL; TRMStVSEL; |
| | TRMstVSEL |
| 3665. | TRSsAVRLR |
| 3666. | TRSsPVRKL |
| 3667. | TRYPtILQL |
| 3668. | TSAsPGKDNY |
| 3669. | TSDsPGKDNY |
| 3670. | TSDsPPHNDI |
| 3671. | TSDtPDYLLKY |
| 3672. | TSEsPGKDNY |
| 3673. | TSEtPDYLLKY |
| 3675. | TSFSVGsDDELGPIR |
| 3676. | TSGPGSRISSSsF |
| 3677. | TSIsPALAR |
| 3678. | TSIsPSRHGAL |
| 3679. | TSPsYIDKL |
| 3680. | TSVsPAPDK |
| 3681. | TTAsPGKDNY |
| 3682. | TTASPGKDNY |
| 3683. | TTDPLIRWDsY |
| 3684. | TTDsPGKDNY |
| 3685. | TTDtPDYLLKY |
| 3686. | TTEsPGKDNY |
| 3687. | TTEtPDYLLKY |
| 3688. | TTKsVKALSSLHG |
| 3689. | TTKsVKALSSLHGDD |
| 3690. | TTKsVKALSSLHGDDQ |
| 3691. | TTKsVKALSSLHGDDQD |
| 3692. | TTKsVKALSSLHGDDQDS |
| 3693. | TTKSVKALSSLHGDDQDsE |
| | D |
| 3694. | TTKSVKALSSLHGDDQDsE |
| | DE |
| 3695. | TVDsPPWQL |
| 3696. | TVFsPTLPAA |
| 3697. | TVFsPTLPAAR |
| 3698. | TVKQKYLsF |
| 3699. | TVMsNSSVIHL |
| 3700. | TVNsPAIYK |
| 3701. | TVNsPAIYKF |
| 3702. | TVtPVPPPQ |
| 3703. | TVYSSEEAELLK; |
| | TVYSsEEAELLK; |
| | TVYssEEAELLK |
| 3674. | TsFADEL |
| 3704. | TYEGIFKtL |
| 3705. | VADSPAEVAL |
| 3706. | VADSPRDTASL |
| 3707. | VADtSIQKL |
| 3708. | VAKRLSL |
| 3709. | VAMPVKKSPRRSSSDEQGLS |
| | YSSLKNV |
| 3710. | VEFPHsPEI |
| 3711. | VEKLPDsPAL |
| 3712. | VELsPAR |
| 3713. | VELsPARSW |
| 3714. | VETsFRKLSF; VETSFRKLsF; |
| | VETsFRKLsF |
| 3715. | VGsDDELGPIR |
| 3716. | VIDsQELSKV |
| 3717. | VIMsIRTKL |
| 3718. | VIsDGGDSEQF |
| 3719. | VLAsPLKTGR |
| 3720. | VLDsPASKK |
| 3721. | VLEKsPGKLLV |
| 3722. | VLFPEsPARA |
| 3723. | VLFRtPLASV |
| 3724. | VLFSsPPQM; VLFsSPPQM; |
| | VLFssPPQM |
| 3725. | VLIENVAsL |
| 3726. | VLIGsPKKV |
| 3727. | VLIGsPKKY |
| 3728. | VLKGsRSSEL |
| 3729. | VLKGsRSSEV |
| 3730. | VLKSRKssVTEE |
| 3731. | VLKVMIGSPK |
| 3732. | VLKVMIGSPKK |
| 3733. | VLKVMIGSPKKK |
| 3734. | VLLsPVPEL |
| 3735. | VLLsPVPEV |
| 3736. | VLMKsPSPAL; |
| | VLMKSPsPAL; |
| | VLMKsPsPAL |
| 3737. | VLMKsPsPAV |
| 3738. | VLQTPPYVK |
| 3739. | VLQtPPYVKK |
| 3740. | VLQtPPYVKY |
| 3741. | VLSDVIPsI |
| 3742. | VLSSLtPAKV |
| 3743. | VLTsNVQTI |
| 3744. | VLYsPQMAL |
| 3745. | VMDsPVHL |
| 3746. | VMFPGNsPSY |
| 3747. | VMFRtPLASV |
| 3748. | VMIGsPKKV |
| 3749. | VMIGsPKKY |
| 3750. | VMKVMIGSPK |
| 3751. | VMKVMIGSPKK |
| 3752. | VMKVMIGSPKKK |
| 3753. | VMKVMIGSPKKY |
| 3754. | VMLsPVPEL |
| 3755. | VMLsPVPEV |
| 3756. | VMQsPLVGV |
| 3757. | VMQTPPYVK |
| 3758. | VMQtPPYVKK |
| 3759. | VMTsLQQEY |
| 3760. | VPAsSTSTL |
| 3761. | VPAtHGQVTY |
| 3762. | VPGVRLLQDsVD |
| 3763. | VPHHGFEDWsQIR |
| 3764. | VPKKPPPsP |
| 3765. | VPKSGRsSSL; VPKSGRSsSL; |
| | VPKSGRSSsL; VPKSGRsSsL; |
| | VPKSGRSssL; VPKSGRsSsL |
| 3766. | VPKsPAFAL |
| 3767. | VPLIRKKsL |
| 3768. | VPREVLRLsF |
| 3769. | VPREVLRLsL |
| 3770. | VPREVLRLsM |
| 3771. | VPREVLRLsV |
| 3772. | VPRPERRSsL |
| 3773. | VPRPERRssL |
| 3774. | VPRPERRsSL |
| 3775. | VPRsPKHAHSSSF |
| 3776. | VPRsPKHAHSSSL |
| 3777. | VPRsPKHAHSSSM |
| 3778. | VPRsPKHAHSSSV |
| 3779. | VPRsPVIKI |
| 3780. | VPRtPSRERSSSA |
| 3781. | VPRtPVGKF |
| 3782. | VPSsPLRKA |
| 3783. | VPTsPKGRLL |
| 3784. | VPTsPKSSL |
| 3785. | VPtTSSSL; VPTtSSSL; |
| | VPTTsSSL; VPttSSSL; |
| | VPtTsSSL; VPTtsSSL; |
| | VPttsSSL |
| 3786. | VPVsGTQGL |
| 3787. | VPVsNQSSL |
| 3788. | VPVsPGQQL |
| 3789. | VPVsSASEL |
| 3790. | VPVsVGPSL |
| 3791. | VRAsKDLAQ |
| 3792. | VRLLQDsVD |
| | VYLPTHTsLLNLT; |
| | VYLPTHtsLLNLT |
| 3793. | VRQsPGPAL |
| 3794. | VRQsVTSFPDADAFHHQ |
| 3795. | VRTPSVQsL |
| 3796. | VRYsQLLGL |
| 3797. | VSDsPSHIA |
| 3798. | VSDsPSHIAT |
| 3799. | VSKVMIGsPKKV |
| 3800. | VSKVMIGsPKKY |
| 380I. | VsPFQEL |
| 3802. | VSPSKSPSLSPSPPsPLEKTPL |
| 3803. | VSsPPPYTAY |
| 3804. | VSSSDsPPRPQPAF |
| 3805. | VSSsPRELL |
| 3806. | VTKsSPRAL; VTKSsPRAL; |
| | VTKssPRAL |
| 3807. | VTQtPPYVKK |
| 3808. | VTtPNRLIY |
| 3809. | VTtPTGYKY |
| 3810. | VTTSTRTYsLG |
| 3811. | VVDsPGQEVL |
| 3812. | VVsEVDIAKAD |
| 3813. | VVSsPKLAPK |
| 3814. | VYIPMsPGAHHF |
| 3815. | VYLPTHTsL |
| 3816. | VYLPTHtSLL; |
| | VYLPTHTSLL; VYLPTHtsLL |
| 3817. | VYLPTHtSLLN; |
| | VYLPTHTsLLN; |
| | VYLPTHtsLLN |
| 3818. | VYLPTHtSLLNL; |
| | VYLPTHTsLLNL; |
| | VYLPTHtsLLNL |
| 3819. | VYLPTHtSLLNLT; |
| | YLDSGIHsGA |
| 3820. | VYTyIQSRF |
| 3821. | WEFGKRDsL |
| 3822. | WIGLNSLsF |
| 3823. | WTHLsSKEVDPS |
| 3824. | WTHLsSKEVDPSTG |
| 3825. | YAFEGTGsL |
| 3826. | YARsVHEEF |
| 3827. | YASSKLLKI; YASsKLLKI; |
| | YAssKLLKI |
| 3828. | YAVPRRGsL |
| 3829. | YAYDGKDyI |
| 3830. | YCIsPSTAAQF |
| 3831. | YEFsPVKML |
| 3832. | YEGsPIKV |
| 3833. | YEGsPIKVT |
| 3834. | YEGsPIKVTL |
| 3835. | YEGsPIKVTL |
| 3836. | YEKLsAEQSPPP |
| 3837. | YEsPGKIFL |
| 3838. | YFsPFRPY |
| 3839. | YGDRTStF |
| 3840. | YGITsPISL |
| 3841. | YHLsPRAFLHY |
| 3842. | YIKtELISV |
| 3843. | yIQSRF |
| 3844. | YLAsLEKKL |
| 3845. | YLDsGIHSG |
| 3846. | YLDsGIHSGA; |
| | YLDSGIHsGA; |
| | YLDsGIHsGA; |
| | YLDsGIHSGV; |
| 3847. | YLDsGIHsGV |
| 3848. | yLGLDVPV |
| 3849. | YLGsISTLVTL |
| 3850. | YLIHsPMSL |
| 3851. | YLLSPLNTL |
| 3852. | YLLsPTKLPSI |
| 3853. | YLLsPTKLPSV |
| 3854. | YLPsFFTKL |
| 3855. | YLPTHTsLL |
| 3856. | yLQSRYYRA |
| 3857. | YLQsRYYRA |
| 3858. | yLQsRYYRA |
| 3859. | YLRsVGDGETV |
| 3860. | YLSDsDTEAKL |
| 3861. | YLVsPITGEKI |
| 3862. | YMDsGIHSGA |
| 3863. | YMDsGIHSGV |
| 3864. | YPDPHsPFAV |
| 3865. | YPGGRRsSL |
| 3866. | YPHsPGSQY |
| 3867. | YPLQIsPVSSY |
| 3868. | YPLsPAKVNQY |
| 3869. | YPLsPTKISEY |
| 3870. | YPLsPTKISQY |
| 3871. | YPRLSIPNL |
| 3872. | YPRsFDEVEGF |
| 3873. | YPRsFDEVEGM |
| 3874. | YPRsFDEVEGV |
| 3875. | YPRsFDEVEGVF |
| 3876. | YPRsFDEVEGVL |
| 3877. | YPRsFDEVEGVM |
| 3878. | YPRsFDEVEGVV |
| 3879. | YPSFRRsSL; YPSFRRSsL; |
| | YPSFRRssL |
| 3880. | YPSsPRKAL |
| 3881. | YPSsPRKF |
| 3882. | YPSsPRKL |
| 3883. | YPSsPRKM |
| 3884. | YPSsPRKV |
| 3885. | YPVsPKQKY |
| 3886. | YPYEFsPVKM |
| 3887. | YQLsPTKLPSI |
| 3888. | YQLsPTKLPSV |
| 3889. | YQRPFsPSAY |
| 3890. | YQRsFDEVEGF |
| 3891. | YQRsFDEVEGL |
| 3892. | YQRsFDEVEGM |
| 3893. | YQRsFDEVEGV |
| 3894. | YQRsFDEVEGVF |
| 3895. | YQRsFDEVEGVL |
| 3896. | YQRsFDEVEGVM |
| 3897. | YQRsFDEVEGVV |
| 3898. | YRNDSSSsL |
| 3899. | YRRsVPTWL |
| 3900. | YRYsPQSFL |
| 3901. | YSDRsSGGSY |
| 3902. | YSEsRSSLDY |
| 3903. | YsFcGTVEY |
| 3904. | YSFsPSKSY |
| 3905. | YSFSSSsIGH |
| 3906. | YSLDsPGPEK |
| 3907. | YSLDsPGPEKM |
| 3908. | YSLDsPGPEKMAL |
| 3909. | YSLsPRPSY |
| 3910. | YSLsPSKSY |
| 3911. | YSLsPSKSYKY |
| 3912. | YSsLVRVL |
| 3913. | YSTtPGGTLY |
| 3914. | YTAGtPYKV |
| 3915. | YTDSESSAsL |
| 3916. | YTsSRDAFGY; |
| | YTSsRDAFGY; |
| | YTssRDAFGY |
| 3917. | YVDAETsL |
| 3918. | YVKLTPVsL |
| 3919. | YVPDsPALL |
| 3920. | YVSsPDPQL |
| 3921. | YYTAGSSSPTHAKSAHV |
| 3975. | RRLsFSTRL |
| 3976. | RRRsRVFDL |
| 3977. | RSFsPKSPLEL |
| 3978. | RSHsLHYLF |
| 3979. | RSKsSImYF |
| 3980. | RSRsDNALHL |
| 3981. | RSVsPTTEM |
| 3982. | RSYsRLETL |
| 3983. | RTLHsPPLQL |
| 3984. | RVAsPKLVm |
| 3985. | SISVQVNSIKFDsE |
| 3986. | SPFQSSPLsL |
| 3987. | SPGsPLHSL |
| 3988. | SPGsPLVSm |
| 3989. | SPHtPSTHF |
| 3990. | SPPNLtPKPL |
| 3991. | SPRDsPAVSL |
| 3992. | sPRsPGRSL |
| 3993. | SPRsPQLSDF |
| 3994. | STsSGRLLY |
| 3995. | SVKsPEVQLL |
| 3996. | TKSsPLKI |
| 3997. | VLVVDTPsI |
| 3998. | VPRPStPSRL |
| 3999. | yAQPQTTTPLPAVSG |
| 4000. | yYPDPHsPFAV |

[0488] In the listing above, the number preceding each sequence or group of sequences corresponds to the SEQ ID NO: in the Sequence Listing submitted herewith. Also, lowercase “s” refers to a modified (e.g., phosphorylated) serine, lowercase “t” refers to a modified (e.g., phosphorylated) threonine, lowercase “y” refers to a modified (e.g., phosphorylated) tyrosine, lowercase “n” refers to a modified (e.g., glycosylated, in some embodiments with hexose-GlcNAc) asparagine, lowercase “k” refers to an N-terminal modified lysine, and lowercase “c” refers to a modified (e.g., cysteinylated or methyl esterified (e.g., homocysteine) cysteine. Lowercase “w” refers to a modification of a tryptophan to kynurenine. In some embodiments, the sequences APPsTSAAAL (SEQ ID NO: 116), IPVsKPLSL (SEQ ID NO: 705), IPVsSHNSL (SEQ ID NO: 708), KPPTsQSSVL (SEQ ID NO: 1033), KPPVsFFSL (SEQ ID NO:1034), KPTLYnVSL (SEQ ID NO: 1079), PPStSAAAL (SEQ ID NO: 1487), PPSTsAAAL (SEQ ID NO: 1487), and RPPQsSSVSL (SEQ ID NO: 2126) can be modified with 2-hexose-GlcNAc, hexose-di-GlcNAc, and/or hexose-GlcNAc. (AcS) refers to an acylated serine.

[0489] With respect to the modifications of the sequences shown above, the particular phosphorylation sites noted in lowercase are exemplary only, and it is understood that any or all serines, threonines, and/or tyrosines that are identified in upper case letters can also be modified (e.g., phosphorylated).

[0490] In some embodiments, a peptide of the presently disclosed subject matter is one that is set forth in Table 7:

1. A composition comprising, consisting essentially of, or consisting of at least or about 1, 2, 3, 4, 5, 6, 7, 8, 9, 10, or more synthetic peptides, wherein each synthetic peptide:
(i) is between 8 and 50 amino acids long; and
(ii) comprises, consists essentially of, or consists of an amino acid sequence selected from the group consisting of SEQ ID NOs: 1-3921 and 3975-4000,
and further wherein said composition optionally has the ability to stimulate a T cell-mediated immune response to at least one of the synthetic peptides and/or is capable of eliciting a memory T cell response to at least one of the synthetic peptides.

2. The composition of claim 1, wherein at least one of the synthetic peptides comprises a substitution of a serine residue with a homo-serine residue.

3. The composition of claim 1, wherein at least one of the synthetic peptides is a phosphopeptide comprising phosphoserine, phosphothreonine, or phosphotyrosine.

4. The composition of claim 1, wherein at least one of the synthetic peptides comprises, consists essentially of, or consists of a phosphopeptide set forth in Table 6.

5. The composition of claim 1, wherein at least one of the synthetic peptides comprises a phosphopeptide mimetic comprising a mimetic of phosphoserine, phosphothreonine, or phosphotyrosine.

6. The composition of claim 5, wherein at least one of the synthetic peptides comprises a phosphopeptide mimetic of a phosphopeptide set forth in Table 6

7. The composition of claim 6, wherein the phosphopeptide mimetic is resistant to dephosphorylation by a phosphatase enzyme.

8. The composition of claim 6, wherein the phosphopeptide mimetic is a synthetic molecule in which a phosphorous atom is linked to a serine, threonine, or tyrosine amino acid residue through a carbon.

9. The composition of claim 1, wherein the composition is immunologically suitable for use in a subject who has or is at risk of developing a cancer and/or a tumor, wherein the cancer and/or the tumor is optionally a breast cancer and/or a tumor, a colorectal cancer and/or a tumor, an esophageal cancer and/or a tumor, an intrahepatic cholangiocarcinoma (bile duct) cancer and/or a tumor, a leukemia, a lymphoma, a melanoma, a head and neck cancer and/or a tumor, ovarian cancer and/or a tumor, pancreatic cancer and/or a tumor, a cancer and/or a tumor of a tonsil, a lung cancer and/or a tumor, a cervical cancer and/or a tumor, a cancer and/or a tumor of partially transformed T-cells, a placental cancer and/or a tumor, a liver cancer and/or a tumor, optionally hepatocellular carcinoma (HCC), and/or a kidney cancer and/or a tumor.

10. The composition of claim 1, wherein the composition comprises, consists essentially of, or consists of at least 2, 3, 4, or 5 different peptides.

11. The composition of claim 1, wherein the composition comprises, consists essentially of, or consists of at least 10 different peptides.

12. The composition of claim 1, wherein the composition comprises, consists essentially of, or consists of at least 15 different peptides.

13. The composition of claim 1, wherein at least one of the synthetic peptides is capable of binding to an MHC class I molecule selected from the group consisting of an HLA-A*0201 molecule, an HLA A*0101 molecule, an HLA A*0301 molecule, an HLA B*4402 molecule, an HLA B*0702 molecule, an HLA B*2705 molecule, an HLA *A1101 molecule, an HLA *A2301 molecule, an HLA *A2402 molecule, an HLA *B0801 molecule, an HLA *B1401 molecule, an HLA *B1402 molecule, an HLA *B1501 molecule, an HLA *B1503 molecule, an HLA *B1510 molecule, an HLA *B1511 molecule, an HLA *B1518 molecule, an HLA *B4001 molecule, an HLA *B4901 molecule, an HLA *C0303 molecule, an HLA *C0304 molecule, an HLA *C0501 molecule, an HLA *0602 molecule, an HLA *0701 molecule, an HLA *0702 molecule, and an HLA *0704 molecule.

14. The composition of claim 1, wherein the composition is capable of increasing the 5-year survival rate of a subject treated with the composition by at least 20 percent relative to average 5-year survival rates that could have been expected without treatment with the composition.

15-17. (canceled)

18. The composition of claim 1, further comprising at least one peptide derived from MelanA (MART-I), gp100 (Pmel 17), tyrosinase, TRP-1, TRP-2, MAGE-1, MAGE-3, BAGE, GAGE-1, GAGE-2, p15(58), CEA, RAGE, NY-ESO (LAGE), SCP-1, Hom/Mel-40, PRAME, p53, H-Ras, HER-2/neu, BCR-ABL, E2A-PRL, H4-RET, IGH-IGK, MYL-RAR, Epstein Barr virus antigens, EBNA, human papillomavirus (HPV) antigens E6 and E7, TSP-180, MAGE-4, MAGE-5, MAGE-6, p185erbB2, p180erbB-3, c-met, nm-23H1, PSA, TAG-72-4, CA 19-9, CA 72-4, CAM 17.1, NuMa, K-ras, β-Catenin, CDK4, Mum-1, p16, TAGE, PSMA, PSCA, CT7, telomerase, 43-9F, 5T4, 791Tgp72, alpha-fetoprotein, β-HCG, BCA225, BTAA, CA 125, CA 15-3 (CA 27.29\BCAA), CA 195, CA 242, CA-50, CAM43, CD68\KP1, CO-029, FGF-5, G250, Ga733 (EpCAM), HTgp-175, M344, MA-50, MG7-Ag, MOV18, NB/70K, NY-CO-1, RCAS1, SDCCAG16, TA-90 (Mac-2 binding protein/cyclophilin C-associated protein), TAAL6, TAG72, TLP, and TPS.

19. The composition of claim 1, wherein the composition further comprises an adjuvant selected from the group consisting of montanide ISA-51, QS-21, a tetanus helper peptide, GM-CSF, cyclophosamide, bacillus Calmette-Guerin (BCG), corynbacterium parvum, levamisole, azimezone, isoprinisone, dinitrochlorobenezene (DNCB), keyhole limpet hemocyanin (KLH), complete Freunds adjuvant, in complete Freunds adjuvant, a mineral gel, aluminum hydroxide (Alum), lysolecithin, a pluronic polyol, a polyanion, an adjuvant peptide, an oil emulsion, dinitrophenol, and diphtheria toxin (DT), or any combination thereof.

20-29. (canceled)

30. A method for treating and/or preventing cancer comprising administering to a subject in need thereof a therapeutically effective dose of a composition of claim 1 and/or a composition comprising, consisting essentially of, or consisting of at least one peptide comprising an amino acid sequence as set forth in Tables 3-6.

31. The method of claim 30, wherein the cancer is selected from the group consisting of breast cancer, colorectal cancer, esophageal cancer, intrahepatic cholangiocarcinoma (bile duct) cancer, leukemia, lymphoma, melanoma, head and neck cancer, ovarian cancer, pancreatic cancer, a cancer of a tonsil, lung cancer, cervical cancer, cancer of partially transformed T-cells, placental cancer, liver cancer, hepatocellular carcinoma (HCC), and kidney cancer, and the at least one peptide comprises, consists essentially of, or consists of an amino acid sequence as set forth in Tables 3-6.

32. (canceled)

33. A method for treating and/or preventing hepatocellular carcinoma (HCC) and/or esophageal cancer comprising administering to a subject in need thereof a therapeutically effective dose of a composition of claim 1 or a composition comprising, consisting essentially of, or consisting of at least one peptide that peptide comprises, consists essentially of, or consists of an amino acid sequence as set forth in Tables 3-6 in combination with a pharmaceutically acceptable carrier.

34-42. (canceled)

43. A kit comprising at least one peptide composition comprising at least one peptide comprising, consisting essentially of, or consisting of an amino acid sequence as set forth in any of Tables 3-6, and a cytokine and/or an adjuvant.

44-96. (canceled)

The application's sequence listing, which the Patent Office published only in electronic form, follows.

SEQUENCE LISTING (4000 sequences)

SEQ ID NO: 1 - protein, 9 aa, Artificial Sequence
  Artifcially synthesized peptide
AAASPLHML

SEQ ID NO: 2 - protein, 10 aa, Artificial Sequence
  Artifcially synthesized peptide
AADGTPKHSF

SEQ ID NO: 3 - protein, 9 aa, Artificial Sequence
  Artifcially synthesized peptide
AADSPSQNL

SEQ ID NO: 4 - protein, 10 aa, Artificial Sequence
  Artifcially synthesized peptide
AADSPSQNLT

SEQ ID NO: 5 - protein, 10 aa, Artificial Sequence
  Artifcially synthesized peptide
AADTPPLETL

SEQ ID NO: 6 - protein, 8 aa, Artificial Sequence
  Artifcially synthesized peptide
AAESPSFL

SEQ ID NO: 7 - protein, 22 aa, Artificial Sequence
  Artifcially synthesized peptide
SAARESHPHGVKRSASPDDDLG

SEQ ID NO: 8 - protein, 11 aa, Artificial Sequence
  Artifcially synthesized peptide
AASDTERDGLA

SEQ ID NO: 9 - protein, 13 aa, Artificial Sequence
  Artifcially synthesized peptide
AASNFKSPVKTIR

SEQ ID NO: 10 - protein, 9 aa, Artificial Sequence
  Artifcially synthesized peptide
AASPGAPQM

SEQ ID NO: 11 - protein, 9 aa, Artificial Sequence
  Artifcially synthesized peptide
ADLSPEREV

SEQ ID NO: 12 - protein, 16 aa, Artificial Sequence
  Artifcially synthesized peptide
ADSGEGDFLAEGGGVR

SEQ ID NO: 13 - protein, 10 aa, Artificial Sequence
  Artifcially synthesized peptide
AEAPLPSPKL

SEQ ID NO: 14 - protein, 9 aa, Artificial Sequence
  Artifcially synthesized peptide
AEAPPSKSP

SEQ ID NO: 15 - protein, 11 aa, Artificial Sequence
  Artifcially synthesized peptide
AEDEIGTPRKF

SEQ ID NO: 16 - protein, 11 aa, Artificial Sequence
  Artifcially synthesized peptide
AEDEIGTPRKY

SEQ ID NO: 17 - protein, 11 aa, Artificial Sequence
  Artifcially synthesized peptide
AEEEIGTPRKF

SEQ ID NO: 18 - protein, 11 aa, Artificial Sequence
  Artifcially synthesized peptide
AEEEIGTPRKW

SEQ ID NO: 19 - protein, 11 aa, Artificial Sequence
  Artifcially synthesized peptide
AEEEIGTPRKY

SEQ ID NO: 20 - protein, 12 aa, Artificial Sequence
  Artifcially synthesized peptide
AEFPSSGSNSVL

SEQ ID NO: 21 - protein, 10 aa, Artificial Sequence
  Artifcially synthesized peptide
AEGSPPPKTY

SEQ ID NO: 22 - protein, 9 aa, Artificial Sequence
  Artifcially synthesized peptide
AEISPGSLP

SEQ ID NO: 23 - protein, 12 aa, Artificial Sequence
  Artifcially synthesized peptide
AEISPGSLPVTA

SEQ ID NO: 24 - protein, 9 aa, Artificial Sequence
  Artifcially synthesized peptide
AEKSYQNSP

SEQ ID NO: 25 - protein, 9 aa, Artificial Sequence
  Artifcially synthesized peptide
AELSPKNLL

SEQ ID NO: 26 - protein, 9 aa, Artificial Sequence
  Artifcially synthesized peptide
AELSPSMAP

SEQ ID NO: 27 - protein, 10 aa, Artificial Sequence
  Artifcially synthesized peptide
AELSPTTLSP

SEQ ID NO: 28 - protein, 10 aa, Artificial Sequence
  Artifcially synthesized peptide
AELSPVEQKL

SEQ ID NO: 29 - protein, 9 aa, Artificial Sequence
  Artifcially synthesized peptide
AEMPTQMSP

SEQ ID NO: 30 - protein, 9 aa, Artificial Sequence
  Artifcially synthesized peptide
AENARSASF

SEQ ID NO: 31 - protein, 10 aa, Artificial Sequence
  Artifcially synthesized peptide
AENSPTRQQF

SEQ ID NO: 32 - protein, 10 aa, Artificial Sequence
  Artifcially synthesized peptide
AENSPTRQQW

SEQ ID NO: 33 - protein, 10 aa, Artificial Sequence
  Artifcially synthesized peptide
AENSPTRQQY

SEQ ID NO: 34 - protein, 9 aa, Artificial Sequence
  Artifcially synthesized peptide
AENSSSREL

SEQ ID NO: 35 - protein, 11 aa, Artificial Sequence
  Artifcially synthesized peptide
AEPTPEKEKRF

SEQ ID NO: 36 - protein, 10 aa, Artificial Sequence
  Artifcially synthesized peptide
AEQGSPRVSY

SEQ ID NO: 37 - protein, 10 aa, Artificial Sequence
  Artifcially synthesized peptide
AERTPELVEL

SEQ ID NO: 38 - protein, 9 aa, Artificial Sequence
  Artifcially synthesized peptide
AESPERVLL

SEQ ID NO: 39 - protein, 11 aa, Artificial Sequence
  Artifcially synthesized peptide
AESSPTAGKKF

SEQ ID NO: 40 - protein, 11 aa, Artificial Sequence
  Artifcially synthesized peptide
AESSPTAGKKL

SEQ ID NO: 41 - protein, 11 aa, Artificial Sequence
  Artifcially synthesized peptide
AESSPTAGKKW

SEQ ID NO: 42 - protein, 11 aa, Artificial Sequence
  Artifcially synthesized peptide
AESSPTAGKKY

SEQ ID NO: 43 - protein, 8 aa, Artificial Sequence
  Artifcially synthesized peptide
AFSPVRSV

SEQ ID NO: 44 - protein, 9 aa, Artificial Sequence
  Artifcially synthesized peptide
AGDSPGSQF

SEQ ID NO: 45 - protein, 9 aa, Artificial Sequence
  Artifcially synthesized peptide
AILSPAFKV

SEQ ID NO: 46 - protein, 9 aa, Artificial Sequence
  Artifcially synthesized peptide
AIMRSPQMV

SEQ ID NO: 47 - protein, 8 aa, Artificial Sequence
  Artifcially synthesized peptide
AISDLQQL

SEQ ID NO: 48 - protein, 8 aa, Artificial Sequence
  Artifcially synthesized peptide
AKLSETIS

SEQ ID NO: 49 - protein, 9 aa, Artificial Sequence
  Artifcially synthesized peptide
ALAAPSPPR

SEQ ID NO: 50 - protein, 9 aa, Artificial Sequence
  Artifcially synthesized peptide
ALAASPHAV

SEQ ID NO: 51 - protein, 11 aa, Artificial Sequence
  Artifcially synthesized peptide
ALDSGASLLHL

SEQ ID NO: 52 - protein, 11 aa, Artificial Sequence
  Artifcially synthesized peptide
ALDSGASLLHV

SEQ ID NO: 53 - protein, 10 aa, Artificial Sequence
  Artifcially synthesized peptide
ALDSPPPPTL

SEQ ID NO: 54 - protein, 9 aa, Artificial Sequence
  Artifcially synthesized peptide
ALDSQVPKV

SEQ ID NO: 55 - protein, 9 aa, Artificial Sequence
  Artifcially synthesized peptide
ALGNTPPFL

SEQ ID NO: 56 - protein, 11 aa, Artificial Sequence
  Artifcially synthesized peptide
ALGSRESLATI

SEQ ID NO: 57 - protein, 11 aa, Artificial Sequence
  Artifcially synthesized peptide
ALGSRESLATL

SEQ ID NO: 58 - protein, 11 aa, Artificial Sequence
  Artifcially synthesized peptide
ALGSRESLATV

SEQ ID NO: 59 - protein, 9 aa, Artificial Sequence
  Artifcially synthesized peptide
ALIHQSLGL

SEQ ID NO: 60 - protein, 9 aa, Artificial Sequence
  Artifcially synthesized peptide
ALIHQSLGV

SEQ ID NO: 61 - protein, 9 aa, Artificial Sequence
  Artifcially synthesized peptide
ALLDIIRSL

SEQ ID NO: 62 - protein, 13 aa, Artificial Sequence
  Artifcially synthesized peptide
ALLGSKSPDPYRL

SEQ ID NO: 63 - protein, 13 aa, Artificial Sequence
  Artifcially synthesized peptide
ALLGSKSPDPYRV

SEQ ID NO: 64 - protein, 9 aa, Artificial Sequence
  Artifcially synthesized peptide
ALLSLLKRV

SEQ ID NO: 65 - protein, 9 aa, Artificial Sequence
  Artifcially synthesized peptide
ALMGSPQLV

SEQ ID NO: 66 - protein, 11 aa, Artificial Sequence
  Artifcially synthesized peptide
ALMGSPQLVAA

SEQ ID NO: 67 - protein, 10 aa, Artificial Sequence
  Artifcially synthesized peptide
ALRSSPIMRK

SEQ ID NO: 68 - protein, 10 aa, Artificial Sequence
  Artifcially synthesized peptide
ALRSSPIMRY

SEQ ID NO: 69 - protein, 9 aa, Artificial Sequence
  Artifcially synthesized peptide
ALSSLIHAL

SEQ ID NO: 70 - protein, 9 aa, Artificial Sequence
  Artifcially synthesized peptide
ALSTPVVEK

SEQ ID NO: 71 - protein, 9 aa, Artificial Sequence
  Artifcially synthesized peptide
ALTSELANA

SEQ ID NO: 72 - protein, 9 aa, Artificial Sequence
  Artifcially synthesized peptide
ALTTSAHSV

SEQ ID NO: 73 - protein, 9 aa, Artificial Sequence
  Artifcially synthesized peptide
ALTTSAHSV

SEQ ID NO: 74 - protein, 9 aa, Artificial Sequence
  Artifcially synthesized peptide
ALTTSAHSV

SEQ ID NO: 75 - protein, 11 aa, Artificial Sequence
  Artifcially synthesized peptide
ALVSPPALHNA

SEQ ID NO: 76 - protein, 11 aa, Artificial Sequence
  Artifcially synthesized peptide
ALVSPPALHNV

SEQ ID NO: 77 - protein, 9 aa, Artificial Sequence
  Artifcially synthesized peptide
ALYSGVHKK

SEQ ID NO: 78 - protein, 9 aa, Artificial Sequence
  Artifcially synthesized peptide
ALYSGVHKY

SEQ ID NO: 79 - protein, 10 aa, Artificial Sequence
  Artifcially synthesized peptide
ALYSPAQPSL

SEQ ID NO: 80 - protein, 10 aa, Artificial Sequence
  Artifcially synthesized peptide
ALYSPAQPSV

SEQ ID NO: 81 - protein, 9 aa, Artificial Sequence
  Artifcially synthesized peptide
ALYTPQAPK

SEQ ID NO: 82 - protein, 9 aa, Artificial Sequence
  Artifcially synthesized peptide
ALYTPQAPY

SEQ ID NO: 83 - protein, 9 aa, Artificial Sequence
  Artifcially synthesized peptide
AMAASPHAV

SEQ ID NO: 84 - protein, 11 aa, Artificial Sequence
  Artifcially synthesized peptide
AMDSGASLLHL

SEQ ID NO: 85 - protein, 11 aa, Artificial Sequence
  Artifcially synthesized peptide
AMDSGASLLHV

SEQ ID NO: 86 - protein, 9 aa, Artificial Sequence
  Artifcially synthesized peptide
AMDSPLLKY

SEQ ID NO: 87 - protein, 9 aa, Artificial Sequence
  Artifcially synthesized peptide
AMGAGHFSV

SEQ ID NO: 88 - protein, 11 aa, Artificial Sequence
  Artifcially synthesized peptide
AMGSRESLATI

SEQ ID NO: 89 - protein, 11 aa, Artificial Sequence
  Artifcially synthesized peptide
AMGSRESLATV

SEQ ID NO: 90 - protein, 13 aa, Artificial Sequence
  Artifcially synthesized peptide
AMLGSKSPDPYRL

SEQ ID NO: 91 - protein, 13 aa, Artificial Sequence
  Artifcially synthesized peptide
AMLGSKSPDPYRV

SEQ ID NO: 92 - protein, 9 aa, Artificial Sequence
  Artifcially synthesized peptide
AMPGSPVEV

SEQ ID NO: 93 - protein, 10 aa, Artificial Sequence
  Artifcially synthesized peptide
AMRSSPIMRK

SEQ ID NO: 94 - protein, 11 aa, Artificial Sequence
  Artifcially synthesized peptide
AMVSPPALHNA

SEQ ID NO: 95 - protein, 11 aa, Artificial Sequence
  Artifcially synthesized peptide
AMVSPPALHNV

SEQ ID NO: 96 - protein, 9 aa, Artificial Sequence
  Artifcially synthesized peptide
AMYSGVHKK

SEQ ID NO: 97 - protein, 10 aa, Artificial Sequence
  Artifcially synthesized peptide
APAGGSPRML

SEQ ID NO: 98 - protein, 9 aa, Artificial Sequence
  Artifcially synthesized peptide
APASPFRQL

SEQ ID NO: 99 - protein, 10 aa, Artificial Sequence
  Artifcially synthesized peptide
APASPFRQLL

SEQ ID NO: 100 - protein, 9 aa, Artificial Sequence
  Artifcially synthesized peptide
APASPLRPL

SEQ ID NO: 101 - protein, 11 aa, Artificial Sequence
  Artifcially synthesized peptide
APASPNHAGVL

SEQ ID NO: 102 - protein, 8 aa, Artificial Sequence
  Artifcially synthesized peptide
APASPRLL

SEQ ID NO: 103 - protein, 10 aa, Artificial Sequence
  Artifcially synthesized peptide
APASPTHPGL

SEQ ID NO: 104 - protein, 11 aa, Artificial Sequence
  Artifcially synthesized peptide
APASPTHPGLM

SEQ ID NO: 105 - protein, 9 aa, Artificial Sequence
  Artifcially synthesized peptide
APDSPRAFL

SEQ ID NO: 106 - protein, 9 aa, Artificial Sequence
  Artifcially synthesized peptide
APDSPSKQL

SEQ ID NO: 107 - protein, 11 aa, Artificial Sequence
  Artifcially synthesized peptide
APGPGFSSRSL

SEQ ID NO: 108 - protein, 11 aa, Artificial Sequence
  Artifcially synthesized peptide
APKSPSQDVKA

SEQ ID NO: 109 - protein, 9 aa, Artificial Sequence
  Artifcially synthesized peptide
APLARASSL

SEQ ID NO: 110 - protein, 9 aa, Artificial Sequence
  Artifcially synthesized peptide
APPAYEKLS

SEQ ID NO: 111 - protein, 12 aa, Artificial Sequence
  Artifcially synthesized peptide
APPAYEKLSAEQ

SEQ ID NO: 112 - protein, 15 aa, Artificial Sequence
  Artifcially synthesized peptide
APPAYEKLSAEQSPP

SEQ ID NO: 113 - protein, 16 aa, Artificial Sequence
  Artifcially synthesized peptide
APPAYEKLSAEQSPPP

SEQ ID NO: 114 - protein, 17 aa, Artificial Sequence
  Artifcially synthesized peptide
APPAYEKLSAEQSPPPY

SEQ ID NO: 115 - protein, 25 aa, Artificial Sequence
  Artifcially synthesized peptide
APPPLVPAPRPSSPPRGPGPARADR

SEQ ID NO: 116 - protein, 10 aa, Artificial Sequence
  Artifcially synthesized peptide
APPSTSAAAL

SEQ ID NO: 117 - protein, 12 aa, Artificial Sequence
  Artifcially synthesized peptide
APRAPSASPLAL

SEQ ID NO: 118 - protein, 10 aa, Artificial Sequence
  Artifcially synthesized peptide
APRDRRAVSF

SEQ ID NO: 119 - protein, 9 aa, Artificial Sequence
  Artifcially synthesized peptide
APRGNVTSL

SEQ ID NO: 120 - protein, 10 aa, Artificial Sequence
  Artifcially synthesized peptide
APRKGSFSAL

SEQ ID NO: 121 - protein, 11 aa, Artificial Sequence
  Artifcially synthesized peptide
APRKGSFSALF

SEQ ID NO: 122 - protein, 11 aa, Artificial Sequence
  Artifcially synthesized peptide
APRKGSFSALL

SEQ ID NO: 123 - protein, 11 aa, Artificial Sequence
  Artifcially synthesized peptide
APRKGSFSALM

SEQ ID NO: 124 - protein, 11 aa, Artificial Sequence
  Artifcially synthesized peptide
APRKGSFSALV

SEQ ID NO: 125 - protein, 10 aa, Artificial Sequence
  Artifcially synthesized peptide
APRNGSGVAL

SEQ ID NO: 126 - protein, 9 aa, Artificial Sequence
  Artifcially synthesized peptide
APRRYSSSF

SEQ ID NO: 127 - protein, 9 aa, Artificial Sequence
  Artifcially synthesized peptide
APRRYSSSL

SEQ ID NO: 128 - protein, 9 aa, Artificial Sequence
  Artifcially synthesized peptide
APRRYSSSM

SEQ ID NO: 129 - protein, 9 aa, Artificial Sequence
  Artifcially synthesized peptide
APRRYSSSV

SEQ ID NO: 130 - protein, 10 aa, Artificial Sequence
  Artifcially synthesized peptide
APRSPPPSRF

SEQ ID NO: 131 - protein, 10 aa, Artificial Sequence
  Artifcially synthesized peptide
APRSPPPSRL

SEQ ID NO: 132 - protein, 10 aa, Artificial Sequence
  Artifcially synthesized peptide
APRSPPPSRM

SEQ ID NO: 133 - protein, 10 aa, Artificial Sequence
  Artifcially synthesized peptide
APRSPPPSRP

SEQ ID NO: 134 - protein, 10 aa, Artificial Sequence
  Artifcially synthesized peptide
APRSPPPSRV

SEQ ID NO: 135 - protein, 9 aa, Artificial Sequence
  Artifcially synthesized peptide
APRTNGVAM

SEQ ID NO: 136 - protein, 10 aa, Artificial Sequence
  Artifcially synthesized peptide
APRTPPGVTF

SEQ ID NO: 137 - protein, 10 aa, Artificial Sequence
  Artifcially synthesized peptide
APSLFHLNTL

SEQ ID NO: 138 - protein, 8 aa, Artificial Sequence
  Artifcially synthesized peptide
APSRQISL

SEQ ID NO: 139 - protein, 11 aa, Artificial Sequence
  Artifcially synthesized peptide
APSSARASPLL

SEQ ID NO: 140 - protein, 12 aa, Artificial Sequence
  Artifcially synthesized peptide
APSTYAHLSPAK

SEQ ID NO: 141 - protein, 17 aa, Artificial Sequence
  Artifcially synthesized peptide
APSTYAHLSPAKTPPPP

SEQ ID NO: 142 - protein, 9 aa, Artificial Sequence
  Artifcially synthesized peptide
APSVRSLSL

SEQ ID NO: 143 - protein, 9 aa, Artificial Sequence
  Artifcially synthesized peptide
APSVRSLSL

SEQ ID NO: 144 - protein, 8 aa, Artificial Sequence
  Artifcially synthesized peptide
APTSAAAL

SEQ ID NO: 145 - protein, 9 aa, Artificial Sequence
  Artifcially synthesized peptide
APTSASNVM

SEQ ID NO: 146 - protein, 9 aa, Artificial Sequence
  Artifcially synthesized peptide
APTSASNVM

SEQ ID NO: 147 - protein, 9 aa, Artificial Sequence
  Artifcially synthesized peptide
APVSASASV

SEQ ID NO: 148 - protein, 8 aa, Artificial Sequence
  Artifcially synthesized peptide
APVSPLKF

SEQ ID NO: 149 - protein, 9 aa, Artificial Sequence
  Artifcially synthesized peptide
APVSPRPGL

SEQ ID NO: 150 - protein, 10 aa, Artificial Sequence
  Artifcially synthesized peptide
APVSPSSQKL

SEQ ID NO: 151 - protein, 9 aa, Artificial Sequence
  Artifcially synthesized peptide
APVSSKSSL

SEQ ID NO: 152 - protein, 13 aa, Artificial Sequence
  Artifcially synthesized peptide
APYRGQLASPSSQ

SEQ ID NO: 153 - protein, 8 aa, Artificial Sequence
  Artifcially synthesized peptide
AQDSPTHL

SEQ ID NO: 154 - protein, 10 aa, Artificial Sequence
  Artifcially synthesized peptide
ARASPRLHFL

SEQ ID NO: 155 - protein, 9 aa, Artificial Sequence
  Artifcially synthesized peptide
ARFSGFYSM

SEQ ID NO: 156 - protein, 11 aa, Artificial Sequence
  Artifcially synthesized peptide
ARFSPDDKYSF

SEQ ID NO: 157 - protein, 11 aa, Artificial Sequence
  Artifcially synthesized peptide
ARFSPDDKYSK

SEQ ID NO: 158 - protein, 11 aa, Artificial Sequence
  Artifcially synthesized peptide
ARFSPDDKYSL

SEQ ID NO: 159 - protein, 11 aa, Artificial Sequence
  Artifcially synthesized peptide
ARFSPDDKYSM

SEQ ID NO: 160 - protein, 11 aa, Artificial Sequence
  Artifcially synthesized peptide
ARFSPDDKYSR

SEQ ID NO: 161 - protein, 11 aa, Artificial Sequence
  Artifcially synthesized peptide
ARFSPDDKYSY

SEQ ID NO: 162 - protein, 9 aa, Artificial Sequence
  Artifcially synthesized peptide
ARFSPKVSL

SEQ ID NO: 163 - protein, 9 aa, Artificial Sequence
  Artifcially synthesized peptide
ARGSLRRLL

SEQ ID NO: 164 - protein, 9 aa, Artificial Sequence
  Artifcially synthesized peptide
ARISRSISL

SEQ ID NO: 165 - protein, 9 aa, Artificial Sequence
  Artifcially synthesized peptide
ARISRSISL

SEQ ID NO: 166 - protein, 10 aa, Artificial Sequence
  Artifcially synthesized peptide
ARTSPINLGL

SEQ ID NO: 167 - protein, 9 aa, Artificial Sequence
  Artifcially synthesized peptide
ARVSPSTSY

SEQ ID NO: 168 - protein, 11 aa, Artificial Sequence
  Artifcially synthesized peptide
ASDEIGTPRKF

SEQ ID NO: 169 - protein, 11 aa, Artificial Sequence
  Artifcially synthesized peptide
ASDEIGTPRKY

SEQ ID NO: 170 - protein, 11 aa, Artificial Sequence
  Artifcially synthesized peptide
ASESPSSLIFY

SEQ ID NO: 171 - protein, 11 aa, Artificial Sequence
  Artifcially synthesized peptide
ASESPSSLIFY

SEQ ID NO: 172 - protein, 11 aa, Artificial Sequence
  Artifcially synthesized peptide
ASEEIGTPRKF

SEQ ID NO: 173 - protein, 11 aa, Artificial Sequence
  Artifcially synthesized peptide
ASEEIGTPRKY

SEQ ID NO: 174 - protein, 11 aa, Artificial Sequence
  Artifcially synthesized peptide
ASESPSSLIFY

SEQ ID NO: 175 - protein, 12 aa, Artificial Sequence
  Artifcially synthesized peptide
ASGVAVSDGVIK

SEQ ID NO: 176 - protein, 15 aa, Artificial Sequence
  Artifcially synthesized peptide
ASISRLSGEQVDGKG

SEQ ID NO: 177 - protein, 13 aa, Artificial Sequence
  Artifcially synthesized peptide
ASKASPTLDFTER

SEQ ID NO: 178 - protein, 27 aa, Artificial Sequence
  Artifcially synthesized peptide
ASKMTQPQSKSAFPLSRKNKGSGSLDG

SEQ ID NO: 179 - protein, 7 aa, Artificial Sequence
  Artifcially synthesized peptide
ASLGFVF

SEQ ID NO: 180 - protein, 9 aa, Artificial Sequence
  Artifcially synthesized peptide
ASLSPSVSK

SEQ ID NO: 181 - protein, 9 aa, Artificial Sequence
  Artifcially synthesized peptide
ASLSRPLNY

SEQ ID NO: 182 - protein, 11 aa, Artificial Sequence
  Artifcially synthesized peptide
ASMSPGHPTHL

SEQ ID NO: 183 - protein, 16 aa, Artificial Sequence
  Artifcially synthesized peptide
ASPTIEAQGTSPAHDN

SEQ ID NO: 184 - protein, 17 aa, Artificial Sequence
  Artifcially synthesized peptide
ASPTIEAQGTSPAHDNI

SEQ ID NO: 185 - protein, 18 aa, Artificial Sequence
  Artifcially synthesized peptide
ASPTIEAQGTSPAHDNIA

SEQ ID NO: 186 - protein, 11 aa, Artificial Sequence
  Artifcially synthesized peptide
ASSPPDRIDIF

SEQ ID NO: 187 - protein, 9 aa, Artificial Sequence
  Artifcially synthesized peptide
ASSSPVTLR

SEQ ID NO: 188 - protein, 9 aa, Artificial Sequence
  Artifcially synthesized peptide
ASSSQIIHI

SEQ ID NO: 189 - protein, 9 aa, Artificial Sequence
  Artifcially synthesized peptide
ATAGPRLGF

SEQ ID NO: 190 - protein, 9 aa, Artificial Sequence
  Artifcially synthesized peptide
ATAGPRLGW

SEQ ID NO: 191 - protein, 9 aa, Artificial Sequence
  Artifcially synthesized peptide
ATAGPRLGY

SEQ ID NO: 192 - protein, 11 aa, Artificial Sequence
  Artifcially synthesized peptide
ATDEIGTPRKF

SEQ ID NO: 193 - protein, 11 aa, Artificial Sequence
  Artifcially synthesized peptide
ATDEIGTPRKY

SEQ ID NO: 194 - protein, 11 aa, Artificial Sequence
  Artifcially synthesized peptide
ATEEIGTPRKF

SEQ ID NO: 195 - protein, 11 aa, Artificial Sequence
  Artifcially synthesized peptide
ATEEIGTPRKY

SEQ ID NO: 196 - protein, 9 aa, Artificial Sequence
  Artifcially synthesized peptide
ATIPRPFSV

SEQ ID NO: 197 - protein, 9 aa, Artificial Sequence
  Artifcially synthesized peptide
ATMKRMLSL

SEQ ID NO: 198 - protein, 10 aa, Artificial Sequence
  Artifcially synthesized peptide
ATWSGSEFEV

SEQ ID NO: 199 - protein, 9 aa, Artificial Sequence
  Artifcially synthesized peptide
ATYTPQAPK

SEQ ID NO: 200 - protein, 10 aa, Artificial Sequence
  Artifcially synthesized peptide
ATYTPQAPKY

SEQ ID NO: 201 - protein, 9 aa, Artificial Sequence
  Artifcially synthesized peptide
AVIHQSLGL

SEQ ID NO: 202 - protein, 12 aa, Artificial Sequence
  Artifcially synthesized peptide
AVILPPLSPYFK

SEQ ID NO: 203 - protein, 9 aa, Artificial Sequence
  Artifcially synthesized peptide
AVRPTRLSL

SEQ ID NO: 204 - protein, 11 aa, Artificial Sequence
  Artifcially synthesized peptide
AVVSPPALHNA

SEQ ID NO: 205 - protein, 11 aa, Artificial Sequence
  Artifcially synthesized peptide
AVVSPPALHNV

SEQ ID NO: 206 - protein, 16 aa, Artificial Sequence
  Artifcially synthesized peptide
AYAQPQTTTPLPAVSG

SEQ ID NO: 207 - protein, 12 aa, Artificial Sequence
  Artifcially synthesized peptide
AYEKLSAEQSPP

SEQ ID NO: 208 - protein, 12 aa, Artificial Sequence
  Artifcially synthesized peptide
AYGGLTSPGLSY

SEQ ID NO: 209 - protein, 9 aa, Artificial Sequence
  Artifcially synthesized peptide
DAKKSPLAL

SEQ ID NO: 210 - protein, 14 aa, Artificial Sequence
  Artifcially synthesized peptide
DDDWTHLSSKEVDP

SEQ ID NO: 211 - protein, 15 aa, Artificial Sequence
  Artifcially synthesized peptide
DDDWTHLSSKEVDPS

SEQ ID NO: 212 - protein, 16 aa, Artificial Sequence
  Artifcially synthesized peptide
DDDWTHLSSKEVDPST

SEQ ID NO: 213 - protein, 17 aa, Artificial Sequence
  Artifcially synthesized peptide
DDDWTHLSSKEVDPSTG

SEQ ID NO: 214 - protein, 14 aa, Artificial Sequence
  Artifcially synthesized peptide
DDWTHLSSKEVDPS

SEQ ID NO: 215 - protein, 9 aa, Artificial Sequence
  Artifcially synthesized peptide
DEFERIKTF

SEQ ID NO: 216 - protein, 9 aa, Artificial Sequence
  Artifcially synthesized peptide
DEFERIKTW

SEQ ID NO: 217 - protein, 9 aa, Artificial Sequence
  Artifcially synthesized peptide
DEFERIKTY

SEQ ID NO: 218 - protein, 17 aa, Artificial Sequence
  Artifcially synthesized peptide
DEGPGHHHKPGLGEGTP

SEQ ID NO: 219 - protein, 9 aa, Artificial Sequence
  Artifcially synthesized peptide
DEISHRASF

SEQ ID NO: 220 - protein, 9 aa, Artificial Sequence
  Artifcially synthesized peptide
DEISHRASW

SEQ ID NO: 221 - protein, 9 aa, Artificial Sequence
  Artifcially synthesized peptide
DEISHRASY

SEQ ID NO: 222 - protein, 8 aa, Artificial Sequence
  Artifcially synthesized peptide
DERLRINS

SEQ ID NO: 223 - protein, 9 aa, Artificial Sequence
  Artifcially synthesized peptide
DERLRINSF

SEQ ID NO: 224 - protein, 9 aa, Artificial Sequence
  Artifcially synthesized peptide
DERLRINSL

SEQ ID NO: 225 - protein, 9 aa, Artificial Sequence
  Artifcially synthesized peptide
DERLRINSW

SEQ ID NO: 226 - protein, 9 aa, Artificial Sequence
  Artifcially synthesized peptide
DERLRINSY

SEQ ID NO: 227 - protein, 9 aa, Artificial Sequence
  Artifcially synthesized peptide
DETERAYSF

SEQ ID NO: 228 - protein, 9 aa, Artificial Sequence
  Artifcially synthesized peptide
DGRRTFPRI

SEQ ID NO: 229 - protein, 15 aa, Artificial Sequence
  Artifcially synthesized peptide
DKLSVIAEDSESGKQ

SEQ ID NO: 230 - protein, 16 aa, Artificial Sequence
  Artifcially synthesized peptide
DKLSVIAEDSESGKQN

SEQ ID NO: 231 - protein, 17 aa, Artificial Sequence
  Artifcially synthesized peptide
DKLSVIAEDSESGKQNP

SEQ ID NO: 232 - protein, 18 aa, Artificial Sequence
  Artifcially synthesized peptide
DKLSVIAEDSESGKQNPG

SEQ ID NO: 233 - protein, 20 aa, Artificial Sequence
  Artifcially synthesized peptide
DKLSVIAEDSESGKQNPGDS

SEQ ID NO: 234 - protein, 9 aa, Artificial Sequence
  Artifcially synthesized peptide
DLKRRSMSI

SEQ ID NO: 235 - protein, 9 aa, Artificial Sequence
  Artifcially synthesized peptide
DLKSSKASL

SEQ ID NO: 236 - protein, 8 aa, Artificial Sequence
  Artifcially synthesized peptide
DLRQAHSL

SEQ ID NO: 237 - protein, 9 aa, Artificial Sequence
  Artifcially synthesized peptide
DLRTVEKEL

SEQ ID NO: 238 - protein, 8 aa, Artificial Sequence
  Artifcially synthesized peptide
DLSEEKFL

SEQ ID NO: 239 - protein, 8 aa, Artificial Sequence
  Artifcially synthesized peptide
DLSEEKFV

SEQ ID NO: 240 - protein, 10 aa, Artificial Sequence
  Artifcially synthesized peptide
DLVPLSPLKK

SEQ ID NO: 241 - protein, 10 aa, Artificial Sequence
  Artifcially synthesized peptide
DLWKITKVMD

SEQ ID NO: 242 - protein, 10 aa, Artificial Sequence
  Artifcially synthesized peptide
DMVPLSPLKK

SEQ ID NO: 243 - protein, 10 aa, Artificial Sequence
  Artifcially synthesized peptide
DPLSVSPARW

SEQ ID NO: 244 - protein, 18 aa, Artificial Sequence
  Artifcially synthesized peptide
DPTRRFFKVTPPPGSGPQ

SEQ ID NO: 245 - protein, 9 aa, Artificial Sequence
  Artifcially synthesized peptide
DQFERIKTL

SEQ ID NO: 246 - protein, 9 aa, Artificial Sequence
  Artifcially synthesized peptide
DQISHRASL

SEQ ID NO: 247 - protein, 8 aa, Artificial Sequence
  Artifcially synthesized peptide
DRKSPRVL

SEQ ID NO: 248 - protein, 9 aa, Artificial Sequence
  Artifcially synthesized peptide
DRKSPSVSL

SEQ ID NO: 249 - protein, 9 aa, Artificial Sequence
  Artifcially synthesized peptide
DRLGSRPSL

SEQ ID NO: 250 - protein, 9 aa, Artificial Sequence
  Artifcially synthesized peptide
DRQRSPIAL

SEQ ID NO: 251 - protein, 10 aa, Artificial Sequence
  Artifcially synthesized peptide
DRSSPPTTPL

SEQ ID NO: 252 - protein, 10 aa, Artificial Sequence
  Artifcially synthesized peptide
DRSSPPTTPL

SEQ ID NO: 253 - protein, 10 aa, Artificial Sequence
  Artifcially synthesized peptide
DRSSPPTTPL

SEQ ID NO: 254 - protein, 10 aa, Artificial Sequence
  Artifcially synthesized peptide
DSDPLSPLKY

SEQ ID NO: 255 - protein, 9 aa, Artificial Sequence
  Artifcially synthesized peptide
DSFESIESY

SEQ ID NO: 256 - protein, 9 aa, Artificial Sequence
  Artifcially synthesized peptide
DSLARILSF

SEQ ID NO: 257 - protein, 6 aa, Artificial Sequence
  Artifcially synthesized peptide
DSSEEK

SEQ ID NO: 258 - protein, 7 aa, Artificial Sequence
  Artifcially synthesized peptide
DSSEEKF

SEQ ID NO: 259 - protein, 8 aa, Artificial Sequence
  Artifcially synthesized peptide
DSSEEKFL

SEQ ID NO: 260 - protein, 9 aa, Artificial Sequence
  Artifcially synthesized peptide
DSSEEKFLR

SEQ ID NO: 261 - protein, 8 aa, Artificial Sequence
  Artifcially synthesized peptide
DSSEEKFV

SEQ ID NO: 262 - protein, 10 aa, Artificial Sequence
  Artifcially synthesized peptide
DSVPLSPLKY

SEQ ID NO: 263 - protein, 9 aa, Artificial Sequence
  Artifcially synthesized peptide
DSVSPSESL

SEQ ID NO: 264 - protein, 10 aa, Artificial Sequence
  Artifcially synthesized peptide
DTDPLSPLKY

SEQ ID NO: 265 - protein, 11 aa, Artificial Sequence
  Artifcially synthesized peptide
DTDSAIGSFRY

SEQ ID NO: 266 - protein, 10 aa, Artificial Sequence
  Artifcially synthesized peptide
DTEPLSPLKY

SEQ ID NO: 267 - protein, 9 aa, Artificial Sequence
  Artifcially synthesized peptide
DTISPTLGF

SEQ ID NO: 268 - protein, 10 aa, Artificial Sequence
  Artifcially synthesized peptide
DTVPLSPLKY

SEQ ID NO: 269 - protein, 10 aa, Artificial Sequence
  Artifcially synthesized peptide
DVYSGTPTKV

SEQ ID NO: 270 - protein, 13 aa, Artificial Sequence
  Artifcially synthesized peptide
DWTHLSSKEVDPS

SEQ ID NO: 271 - protein, 15 aa, Artificial Sequence
  Artifcially synthesized peptide
DWTHLSSKEVDPSTG

SEQ ID NO: 272 - protein, 10 aa, Artificial Sequence
  Artifcially synthesized peptide
DYMDGTMSQV

SEQ ID NO: 273 - protein, 9 aa, Artificial Sequence
  Artifcially synthesized peptide
DYSPYFKTI

SEQ ID NO: 274 - protein, 9 aa, Artificial Sequence
  Artifcially synthesized peptide
EASSVTREL

SEQ ID NO: 275 - protein, 10 aa, Artificial Sequence
  Artifcially synthesized peptide
EEAPQTPVAF

SEQ ID NO: 276 - protein, 11 aa, Artificial Sequence
  Artifcially synthesized peptide
EEFSPRQAQMF

SEQ ID NO: 277 - protein, 19 aa, Artificial Sequence
  Artifcially synthesized peptide
EEGSPTMVEKGLEPGVFTL

SEQ ID NO: 278 - protein, 9 aa, Artificial Sequence
  Artifcially synthesized peptide
EEIGTPRKF

SEQ ID NO: 279 - protein, 11 aa, Artificial Sequence
  Artifcially synthesized peptide
EELSPLALGRF

SEQ ID NO: 280 - protein, 9 aa, Artificial Sequence
  Artifcially synthesized peptide
EELSPTAKF

SEQ ID NO: 281 - protein, 24 aa, Artificial Sequence
  Artifcially synthesized peptide
EEMPENALPSDEDDKDPNDPYRAL

SEQ ID NO: 282 - protein, 9 aa, Artificial Sequence
  Artifcially synthesized peptide
EEQSFLQKF

SEQ ID NO: 283 - protein, 9 aa, Artificial Sequence
  Artifcially synthesized peptide
EERRSPPAP

SEQ ID NO: 284 - protein, 10 aa, Artificial Sequence
  Artifcially synthesized peptide
EERSPSWISA

SEQ ID NO: 285 - protein, 10 aa, Artificial Sequence
  Artifcially synthesized peptide
EESSDDGKKF

SEQ ID NO: 286 - protein, 10 aa, Artificial Sequence
  Artifcially synthesized peptide
EESSDDGKKW

SEQ ID NO: 287 - protein, 10 aa, Artificial Sequence
  Artifcially synthesized peptide
EESSDDGKKY

SEQ ID NO: 288 - protein, 23 aa, Artificial Sequence
  Artifcially synthesized peptide
EGEEPTVYSDEEEPKDESARKND

SEQ ID NO: 289 - protein, 18 aa, Artificial Sequence
  Artifcially synthesized peptide
EGSPTMVEKGLEPGVFTL

SEQ ID NO: 290 - protein, 9 aa, Artificial Sequence
  Artifcially synthesized peptide
EHVPSSSSI

SEQ ID NO: 291 - protein, 10 aa, Artificial Sequence
  Artifcially synthesized peptide
EILNRSPRNR

SEQ ID NO: 292 - protein, 9 aa, Artificial Sequence
  Artifcially synthesized peptide
ELFSSPPAV

SEQ ID NO: 293 - protein, 10 aa, Artificial Sequence
  Artifcially synthesized peptide
ELKKSPTSLK

SEQ ID NO: 294 - protein, 10 aa, Artificial Sequence
  Artifcially synthesized peptide
ELKKSPTSLY

SEQ ID NO: 295 - protein, 12 aa, Artificial Sequence
  Artifcially synthesized peptide
ELLMPHRISSHF

SEQ ID NO: 296 - protein, 13 aa, Artificial Sequence
  Artifcially synthesized peptide
ELLMPHRISSHFL

SEQ ID NO: 297 - protein, 9 aa, Artificial Sequence
  Artifcially synthesized peptide
ELLPRRNSL

SEQ ID NO: 298 - protein, 10 aa, Artificial Sequence
  Artifcially synthesized peptide
ELRISGSVQL

SEQ ID NO: 299 - protein, 10 aa, Artificial Sequence
  Artifcially synthesized peptide
EMKKSPTSLK

SEQ ID NO: 300 - protein, 21 aa, Artificial Sequence
  Artifcially synthesized peptide
EPASPAASISRLSGEQVDGKG

SEQ ID NO: 301 - protein, 9 aa, Artificial Sequence
  Artifcially synthesized peptide
EPKRRSARF

SEQ ID NO: 302 - protein, 9 aa, Artificial Sequence
  Artifcially synthesized peptide
EPKRRSARL

SEQ ID NO: 303 - protein, 9 aa, Artificial Sequence
  Artifcially synthesized peptide
EPKRRSARM

SEQ ID NO: 304 - protein, 9 aa, Artificial Sequence
  Artifcially synthesized peptide
EPKRRSARV

SEQ ID NO: 305 - protein, 14 aa, Artificial Sequence
  Artifcially synthesized peptide
EPRNSLPASPAHQL

SEQ ID NO: 306 - protein, 9 aa, Artificial Sequence
  Artifcially synthesized peptide
EPRSPSHSF

SEQ ID NO: 307 - protein, 9 aa, Artificial Sequence
  Artifcially synthesized peptide
EPRSPSHSL

SEQ ID NO: 308 - protein, 9 aa, Artificial Sequence
  Artifcially synthesized peptide
EPRSPSHSM

SEQ ID NO: 309 - protein, 9 aa, Artificial Sequence
  Artifcially synthesized peptide
EPRSPSHSV

SEQ ID NO: 310 - protein, 9 aa, Artificial Sequence
  Artifcially synthesized peptide
EPSSTVVSL

SEQ ID NO: 311 - protein, 9 aa, Artificial Sequence
  Artifcially synthesized peptide
ERLKIRGSL

SEQ ID NO: 312 - protein, 15 aa, Artificial Sequence
  Artifcially synthesized peptide
ERSPLLSQETAGQKP

SEQ ID NO: 313 - protein, 16 aa, Artificial Sequence
  Artifcially synthesized peptide
ERSPLLSQETAGQKPL

SEQ ID NO: 314 - protein, 9 aa, Artificial Sequence
  Artifcially synthesized peptide
ERVDSLVSL

SEQ ID NO: 315 - protein, 8 aa, Artificial Sequence
  Artifcially synthesized peptide
ESDSLPRY

SEQ ID NO: 316 - protein, 8 aa, Artificial Sequence
  Artifcially synthesized peptide
ESESLPRY

SEQ ID NO: 317 - protein, 13 aa, Artificial Sequence
  Artifcially synthesized peptide
ESSVRSQEDQLSR

SEQ ID NO: 318 - protein, 14 aa, Artificial Sequence
  Artifcially synthesized peptide
ESSVRSQEDQLSRR

SEQ ID NO: 319 - protein, 8 aa, Artificial Sequence
  Artifcially synthesized peptide
ETDSLPRY

SEQ ID NO: 320 - protein, 8 aa, Artificial Sequence
  Artifcially synthesized peptide
ETESLPRY

SEQ ID NO: 321 - protein, 10 aa, Artificial Sequence
  Artifcially synthesized peptide
FAFPGSTNSL

SEQ ID NO: 322 - protein, 10 aa, Artificial Sequence
  Artifcially synthesized peptide
FAFPGSTNSL

SEQ ID NO: 323 - protein, 10 aa, Artificial Sequence
  Artifcially synthesized peptide
FASPTSPPVL

SEQ ID NO: 324 - protein, 9 aa, Artificial Sequence
  Artifcially synthesized peptide
FATIRTASL

SEQ ID NO: 325 - protein, 13 aa, Artificial Sequence
  Artifcially synthesized peptide
FAVSPIPGRGGVL

SEQ ID NO: 326 - protein, 9 aa, Artificial Sequence
  Artifcially synthesized peptide
FAYGSGNSL

SEQ ID NO: 327 - protein, 11 aa, Artificial Sequence
  Artifcially synthesized peptide
FAYSPGGAHGM

SEQ ID NO: 328 - protein, 12 aa, Artificial Sequence
  Artifcially synthesized peptide
FAYSPGGAHGML

SEQ ID NO: 329 - protein, 13 aa, Artificial Sequence
  Artifcially synthesized peptide
FDKHTLGDSDNES

SEQ ID NO: 330 - protein, 10 aa, Artificial Sequence
  Artifcially synthesized peptide
FEDDDSNEKL

SEQ ID NO: 331 - protein, 9 aa, Artificial Sequence
  Artifcially synthesized peptide
FGINSPQAL

SEQ ID NO: 332 - protein, 9 aa, Artificial Sequence
  Artifcially synthesized peptide
FGLARAFSL

SEQ ID NO: 333 - protein, 7 aa, Artificial Sequence
  Artifcially synthesized peptide
FGRKPSL

SEQ ID NO: 334 - protein, 9 aa, Artificial Sequence
  Artifcially synthesized peptide
FGYDSPHDL

SEQ ID NO: 335 - protein, 8 aa, Artificial Sequence
  Artifcially synthesized peptide
FIESPSKL

SEQ ID NO: 336 - protein, 8 aa, Artificial Sequence
  Artifcially synthesized peptide
FIESPSKY

SEQ ID NO: 337 - protein, 11 aa, Artificial Sequence
  Artifcially synthesized peptide
FIGSPTTPAGL

SEQ ID NO: 338 - protein, 8 aa, Artificial Sequence
  Artifcially synthesized peptide
FKLSGLSF

SEQ ID NO: 339 - protein, 12 aa, Artificial Sequence
  Artifcially synthesized peptide
FKMPQEKSPGYS

SEQ ID NO: 340 - protein, 9 aa, Artificial Sequence
  Artifcially synthesized peptide
FKSPVKTIR

SEQ ID NO: 341 - protein, 8 aa, Artificial Sequence
  Artifcially synthesized peptide
FKTQPVTF

SEQ ID NO: 342 - protein, 9 aa, Artificial Sequence
  Artifcially synthesized peptide
FLDNSFEKV

SEQ ID NO: 343 - protein, 11 aa, Artificial Sequence
  Artifcially synthesized peptide
FLDRPPTPLFI

SEQ ID NO: 344 - protein, 9 aa, Artificial Sequence
  Artifcially synthesized peptide
FLDSAYFRL

SEQ ID NO: 345 - protein, 9 aa, Artificial Sequence
  Artifcially synthesized peptide
FLDSLRDLI

SEQ ID NO: 346 - protein, 9 aa, Artificial Sequence
  Artifcially synthesized peptide
FLDTPIAKV

SEQ ID NO: 347 - protein, 12 aa, Artificial Sequence
  Artifcially synthesized peptide
FLFDKPVSPLLL

SEQ ID NO: 348 - protein, 9 aa, Artificial Sequence
  Artifcially synthesized peptide
FLGVRPKSA

SEQ ID NO: 349 - protein, 10 aa, Artificial Sequence
  Artifcially synthesized peptide
FLIIRTVLQL

SEQ ID NO: 350 - protein, 14 aa, Artificial Sequence
  Artifcially synthesized peptide
FLITGGGKGSGFSL

SEQ ID NO: 351 - protein, 10 aa, Artificial Sequence
  Artifcially synthesized peptide
FLLSPSDQEM

SEQ ID NO: 352 - protein, 10 aa, Artificial Sequence
  Artifcially synthesized peptide
FLLSQNFDDE

SEQ ID NO: 353 - protein, 10 aa, Artificial Sequence
  Artifcially synthesized peptide
FLMSDRSLHL

SEQ ID NO: 354 - protein, 11 aa, Artificial Sequence
  Artifcially synthesized peptide
FLPSPDYFPSV

SEQ ID NO: 355 - protein, 9 aa, Artificial Sequence
  Artifcially synthesized peptide
FLSRSIPSL

SEQ ID NO: 356 - protein, 9 aa, Artificial Sequence
  Artifcially synthesized peptide
FLYSGKETK

SEQ ID NO: 357 - protein, 9 aa, Artificial Sequence
  Artifcially synthesized peptide
FLYSGKETY

SEQ ID NO: 358 - protein, 9 aa, Artificial Sequence
  Artifcially synthesized peptide
FPASPSVSL

SEQ ID NO: 359 - protein, 9 aa, Artificial Sequence
  Artifcially synthesized peptide
FPHSLLSVF

SEQ ID NO: 360 - protein, 9 aa, Artificial Sequence
  Artifcially synthesized peptide
FPHSLLSVI

SEQ ID NO: 361 - protein, 9 aa, Artificial Sequence
  Artifcially synthesized peptide
FPHSLLSVL

SEQ ID NO: 362 - protein, 9 aa, Artificial Sequence
  Artifcially synthesized peptide
FPHSLLSVM

SEQ ID NO: 363 - protein, 9 aa, Artificial Sequence
  Artifcially synthesized peptide
FPHSLLSVV

SEQ ID NO: 364 - protein, 8 aa, Artificial Sequence
  Artifcially synthesized peptide
FPISPVRF

SEQ ID NO: 365 - protein, 8 aa, Artificial Sequence
  Artifcially synthesized peptide
FPISPVRL

SEQ ID NO: 366 - protein, 8 aa, Artificial Sequence
  Artifcially synthesized peptide
FPISPVRM

SEQ ID NO: 367 - protein, 8 aa, Artificial Sequence
  Artifcially synthesized peptide
FPISPVRV

SEQ ID NO: 368 - protein, 9 aa, Artificial Sequence
  Artifcially synthesized peptide
FPLARQFSL

SEQ ID NO: 369 - protein, 11 aa, Artificial Sequence
  Artifcially synthesized peptide
FPLDSPKTLVL

SEQ ID NO: 370 - protein, 9 aa, Artificial Sequence
  Artifcially synthesized peptide
FPLSPLRKY

SEQ ID NO: 371 - protein, 11 aa, Artificial Sequence
  Artifcially synthesized peptide
FPLSPTKLSQY

SEQ ID NO: 372 - protein, 9 aa, Artificial Sequence
  Artifcially synthesized peptide
FPRASPRAL

SEQ ID NO: 373 - protein, 9 aa, Artificial Sequence
  Artifcially synthesized peptide
FPRRHSVTL

SEQ ID NO: 374 - protein, 10 aa, Artificial Sequence
  Artifcially synthesized peptide
FPRSPTKSSF

SEQ ID NO: 375 - protein, 10 aa, Artificial Sequence
  Artifcially synthesized peptide
FPRSPTKSSL

SEQ ID NO: 376 - protein, 12 aa, Artificial Sequence
  Artifcially synthesized peptide
FPRSPTKSSLDF

SEQ ID NO: 377 - protein, 12 aa, Artificial Sequence
  Artifcially synthesized peptide
FPRSPTKSSLDL

SEQ ID NO: 378 - protein, 12 aa, Artificial Sequence
  Artifcially synthesized peptide
FPRSPTKSSLDM

SEQ ID NO: 379 - protein, 12 aa, Artificial Sequence
  Artifcially synthesized peptide
FPRSPTKSSLDV

SEQ ID NO: 380 - protein, 10 aa, Artificial Sequence
  Artifcially synthesized peptide
FPRSPTKSSM

SEQ ID NO: 381 - protein, 10 aa, Artificial Sequence
  Artifcially synthesized peptide
FPRSPTKSSV

SEQ ID NO: 382 - protein, 9 aa, Artificial Sequence
  Artifcially synthesized peptide
FQYSKSPSL

SEQ ID NO: 383 - protein, 9 aa, Artificial Sequence
  Artifcially synthesized peptide
FRFPSGAEL

SEQ ID NO: 384 - protein, 9 aa, Artificial Sequence
  Artifcially synthesized peptide
FRFSGRTEY

SEQ ID NO: 385 - protein, 9 aa, Artificial Sequence
  Artifcially synthesized peptide
FRGRYRSPY

SEQ ID NO: 386 - protein, 9 aa, Artificial Sequence
  Artifcially synthesized peptide
FRKSMVEHY

SEQ ID NO: 387 - protein, 10 aa, Artificial Sequence
  Artifcially synthesized peptide
FRRSPTKSSF

SEQ ID NO: 388 - protein, 10 aa, Artificial Sequence
  Artifcially synthesized peptide
FRRSPTKSSL

SEQ ID NO: 389 - protein, 11 aa, Artificial Sequence
  Artifcially synthesized peptide
FRRSPTKSSLD

SEQ ID NO: 390 - protein, 12 aa, Artificial Sequence
  Artifcially synthesized peptide
FRRSPTKSSLDF

SEQ ID NO: 391 - protein, 12 aa, Artificial Sequence
  Artifcially synthesized peptide
FRRSPTKSSLDL

SEQ ID NO: 392 - protein, 12 aa, Artificial Sequence
  Artifcially synthesized peptide
FRRSPTKSSLDM

SEQ ID NO: 393 - protein, 12 aa, Artificial Sequence
  Artifcially synthesized peptide
FRRSPTKSSLDV

SEQ ID NO: 394 - protein, 12 aa, Artificial Sequence
  Artifcially synthesized peptide
FRRSPTKSSLDY

SEQ ID NO: 395 - protein, 10 aa, Artificial Sequence
  Artifcially synthesized peptide
FRRSPTKSSM

SEQ ID NO: 396 - protein, 10 aa, Artificial Sequence
  Artifcially synthesized peptide
FRRSPTKSSV

SEQ ID NO: 397 - protein, 9 aa, Artificial Sequence
  Artifcially synthesized peptide
FRYSGKTEF

SEQ ID NO: 398 - protein, 9 aa, Artificial Sequence
  Artifcially synthesized peptide
FRYSGKTEK

SEQ ID NO: 399 - protein, 9 aa, Artificial Sequence
  Artifcially synthesized peptide
FRYSGKTEL

SEQ ID NO: 400 - protein, 9 aa, Artificial Sequence
  Artifcially synthesized peptide
FRYSGKTEM

SEQ ID NO: 401 - protein, 9 aa, Artificial Sequence
  Artifcially synthesized peptide
FRYSGKTER

SEQ ID NO: 402 - protein, 9 aa, Artificial Sequence
  Artifcially synthesized peptide
FRYSGKTEY

SEQ ID NO: 403 - protein, 9 aa, Artificial Sequence
  Artifcially synthesized peptide
FRYSGRTQA

SEQ ID NO: 404 - protein, 10 aa, Artificial Sequence
  Artifcially synthesized peptide
FSDSHEGFSY

SEQ ID NO: 405 - protein, 10 aa, Artificial Sequence
  Artifcially synthesized peptide
FSESHEGFSY

SEQ ID NO: 406 - protein, 9 aa, Artificial Sequence
  Artifcially synthesized peptide
FSESPSKLW

SEQ ID NO: 407 - protein, 8 aa, Artificial Sequence
  Artifcially synthesized peptide
FSESPSKY

SEQ ID NO: 408 - protein, 9 aa, Artificial Sequence
  Artifcially synthesized peptide
FSFAGFPSA

SEQ ID NO: 409 - protein, 7 aa, Artificial Sequence
  Artifcially synthesized peptide
FSFKKSF

SEQ ID NO: 410 - protein, 9 aa, Artificial Sequence
  Artifcially synthesized peptide
FSFKKSFKL

SEQ ID NO: 411 - protein, 10 aa, Artificial Sequence
  Artifcially synthesized peptide
FSFKKSFKLS

SEQ ID NO: 412 - protein, 8 aa, Artificial Sequence
  Artifcially synthesized peptide
FSISPVRF

SEQ ID NO: 413 - protein, 8 aa, Artificial Sequence
  Artifcially synthesized peptide
FSISPVRL

SEQ ID NO: 414 - protein, 8 aa, Artificial Sequence
  Artifcially synthesized peptide
FSISPVRM

SEQ ID NO: 415 - protein, 8 aa, Artificial Sequence
  Artifcially synthesized peptide
FSISPVRV

SEQ ID NO: 416 - protein, 10 aa, Artificial Sequence
  Artifcially synthesized peptide
FSSSHEGFSY

SEQ ID NO: 417 - protein, 10 aa, Artificial Sequence
  Artifcially synthesized peptide
FSSSHEGFSY

SEQ ID NO: 418 - protein, 9 aa, Artificial Sequence
  Artifcially synthesized peptide
FSVASPLTL

SEQ ID NO: 419 - protein, 9 aa, Artificial Sequence
  Artifcially synthesized peptide
FSVSPASTL

SEQ ID NO: 420 - protein, 9 aa, Artificial Sequence
  Artifcially synthesized peptide
FSYSPRLPL

SEQ ID NO: 421 - protein, 10 aa, Artificial Sequence
  Artifcially synthesized peptide
FTDSHEGFSY

SEQ ID NO: 422 - protein, 10 aa, Artificial Sequence
  Artifcially synthesized peptide
FTDVNSILRY

SEQ ID NO: 423 - protein, 10 aa, Artificial Sequence
  Artifcially synthesized peptide
FTESHEGFSY

SEQ ID NO: 424 - protein, 8 aa, Artificial Sequence
  Artifcially synthesized peptide
FTESPSKL

SEQ ID NO: 425 - protein, 8 aa, Artificial Sequence
  Artifcially synthesized peptide
FTESPSKY

SEQ ID NO: 426 - protein, 9 aa, Artificial Sequence
  Artifcially synthesized peptide
FTKSPYQEF

SEQ ID NO: 427 - protein, 10 aa, Artificial Sequence
  Artifcially synthesized peptide
FTSSHEGFSY

SEQ ID NO: 428 - protein, 10 aa, Artificial Sequence
  Artifcially synthesized peptide
FVSEGDGGRL

SEQ ID NO: 429 - protein, 13 aa, Artificial Sequence
  Artifcially synthesized peptide
FVSKVMIGSPKKV

SEQ ID NO: 430 - protein, 9 aa, Artificial Sequence
  Artifcially synthesized peptide
FVTTPTAEL

SEQ ID NO: 431 - protein, 11 aa, Artificial Sequence
  Artifcially synthesized peptide
GALSPSLLHSL

SEQ ID NO: 432 - protein, 9 aa, Artificial Sequence
  Artifcially synthesized peptide
GAQPGRHSF

SEQ ID NO: 433 - protein, 9 aa, Artificial Sequence
  Artifcially synthesized peptide
GAQPGRHSL

SEQ ID NO: 434 - protein, 9 aa, Artificial Sequence
  Artifcially synthesized peptide
GAQPGRHSV

SEQ ID NO: 435 - protein, 9 aa, Artificial Sequence
  Artifcially synthesized peptide
GARTPSPSL

SEQ ID NO: 436 - protein, 9 aa, Artificial Sequence
  Artifcially synthesized peptide
GATTTAPSL

SEQ ID NO: 437 - protein, 9 aa, Artificial Sequence
  Artifcially synthesized peptide
GAVSPVGEL

SEQ ID NO: 438 - protein, 14 aa, Artificial Sequence
  Artifcially synthesized peptide
GDDDWTHLSSKEVD

SEQ ID NO: 439 - protein, 15 aa, Artificial Sequence
  Artifcially synthesized peptide
GDDDWTHLSSKEVDP

SEQ ID NO: 440 - protein, 16 aa, Artificial Sequence
  Artifcially synthesized peptide
GDDDWTHLSSKEVDPS

SEQ ID NO: 441 - protein, 17 aa, Artificial Sequence
  Artifcially synthesized peptide
GDDDWTHLSSKEVDPST

SEQ ID NO: 442 - protein, 18 aa, Artificial Sequence
  Artifcially synthesized peptide
GDDDWTHLSSKEVDPSTG

SEQ ID NO: 443 - protein, 18 aa, Artificial Sequence
  Artifcially synthesized peptide
GDEGPGHHHKPGLGEGTP

SEQ ID NO: 444 - protein, 9 aa, Artificial Sequence
  Artifcially synthesized peptide
GEASPLSSL

SEQ ID NO: 445 - protein, 9 aa, Artificial Sequence
  Artifcially synthesized peptide
GEASPSHII

SEQ ID NO: 446 - protein, 11 aa, Artificial Sequence
  Artifcially synthesized peptide
GEESSDDGKKF

SEQ ID NO: 447 - protein, 11 aa, Artificial Sequence
  Artifcially synthesized peptide
GEESSDDGKKW

SEQ ID NO: 448 - protein, 11 aa, Artificial Sequence
  Artifcially synthesized peptide
GEESSDDGKKY

SEQ ID NO: 449 - protein, 9 aa, Artificial Sequence
  Artifcially synthesized peptide
GEFGGFGSV

SEQ ID NO: 450 - protein, 9 aa, Artificial Sequence
  Artifcially synthesized peptide
GEISPQREV

SEQ ID NO: 451 - protein, 9 aa, Artificial Sequence
  Artifcially synthesized peptide
GEISPTQIL

SEQ ID NO: 452 - protein, 10 aa, Artificial Sequence
  Artifcially synthesized peptide
GEKSPPYGVP

SEQ ID NO: 453 - protein, 9 aa, Artificial Sequence
  Artifcially synthesized peptide
GELPSPGKV

SEQ ID NO: 454 - protein, 11 aa, Artificial Sequence
  Artifcially synthesized peptide
GELPTSPLHLL

SEQ ID NO: 455 - protein, 10 aa, Artificial Sequence
  Artifcially synthesized peptide
GEMSPQRFFF

SEQ ID NO: 456 - protein, 10 aa, Artificial Sequence
  Artifcially synthesized peptide
GENSGIGKLF

SEQ ID NO: 457 - protein, 9 aa, Artificial Sequence
  Artifcially synthesized peptide
GEPHSSPEL

SEQ ID NO: 458 - protein, 9 aa, Artificial Sequence
  Artifcially synthesized peptide
GEQSPNVSL

SEQ ID NO: 459 - protein, 16 aa, Artificial Sequence
  Artifcially synthesized peptide
GERSPLLSQETAGQKP

SEQ ID NO: 460 - protein, 17 aa, Artificial Sequence
  Artifcially synthesized peptide
GERSPLLSQETAGQKPL

SEQ ID NO: 461 - protein, 9 aa, Artificial Sequence
  Artifcially synthesized peptide
GERSPPRIL

SEQ ID NO: 462 - protein, 9 aa, Artificial Sequence
  Artifcially synthesized peptide
GETSLMRTL

SEQ ID NO: 463 - protein, 10 aa, Artificial Sequence
  Artifcially synthesized peptide
GETSPHTFQL

SEQ ID NO: 464 - protein, 9 aa, Artificial Sequence
  Artifcially synthesized peptide
GETSPRTKI

SEQ ID NO: 465 - protein, 11 aa, Artificial Sequence
  Artifcially synthesized peptide
GETSPRTKITW

SEQ ID NO: 466 - protein, 9 aa, Artificial Sequence
  Artifcially synthesized peptide
GETSYIRVY

SEQ ID NO: 467 - protein, 17 aa, Artificial Sequence
  Artifcially synthesized peptide
GGDDDWTHLSSKEVDPS

SEQ ID NO: 468 - protein, 19 aa, Artificial Sequence
  Artifcially synthesized peptide
GGDDDWTHLSSKEVDPSTG

SEQ ID NO: 469 - protein, 8 aa, Artificial Sequence
  Artifcially synthesized peptide
GGDSPVRL

SEQ ID NO: 470 - protein, 10 aa, Artificial Sequence
  Artifcially synthesized peptide
GGLTSPGLSY

SEQ ID NO: 471 - protein, 12 aa, Artificial Sequence
  Artifcially synthesized peptide
GGPHFSPEHKEL

SEQ ID NO: 472 - protein, 12 aa, Artificial Sequence
  Artifcially synthesized peptide
GGSFGGRSSGSP

SEQ ID NO: 473 - protein, 12 aa, Artificial Sequence
  Artifcially synthesized peptide
GGSFGGRSSGSV

SEQ ID NO: 474 - protein, 9 aa, Artificial Sequence
  Artifcially synthesized peptide
GHGSPFPSL

SEQ ID NO: 475 - protein, 13 aa, Artificial Sequence
  Artifcially synthesized peptide
GHHHKPGLGEGTP

SEQ ID NO: 476 - protein, 9 aa, Artificial Sequence
  Artifcially synthesized peptide
GHSKTILCM

SEQ ID NO: 477 - protein, 9 aa, Artificial Sequence
  Artifcially synthesized peptide
GIDSPSSSV

SEQ ID NO: 478 - protein, 10 aa, Artificial Sequence
  Artifcially synthesized peptide
GIFPGTPLKK

SEQ ID NO: 479 - protein, 9 aa, Artificial Sequence
  Artifcially synthesized peptide
GIMSPLAKK

SEQ ID NO: 480 - protein, 17 aa, Artificial Sequence
  Artifcially synthesized peptide
GKGGSYSQAASSDSAQG

SEQ ID NO: 481 - protein, 10 aa, Artificial Sequence
  Artifcially synthesized peptide
GLAPNTPGKA

SEQ ID NO: 482 - protein, 9 aa, Artificial Sequence
  Artifcially synthesized peptide
GLAPTPPSM

SEQ ID NO: 483 - protein, 11 aa, Artificial Sequence
  Artifcially synthesized peptide
GLASPTAITPV

SEQ ID NO: 484 - protein, 9 aa, Artificial Sequence
  Artifcially synthesized peptide
GLDSGFHSV

SEQ ID NO: 485 - protein, 10 aa, Artificial Sequence
  Artifcially synthesized peptide
GLDSLDQVEI

SEQ ID NO: 486 - protein, 9 aa, Artificial Sequence
  Artifcially synthesized peptide
GLGELLRSL

SEQ ID NO: 487 - protein, 11 aa, Artificial Sequence
  Artifcially synthesized peptide
GLIRSRSFIFK

SEQ ID NO: 488 - protein, 11 aa, Artificial Sequence
  Artifcially synthesized peptide
GLIRSRSFIFY

SEQ ID NO: 489 - protein, 10 aa, Artificial Sequence
  Artifcially synthesized peptide
GLISPELRHL

SEQ ID NO: 490 - protein, 9 aa, Artificial Sequence
  Artifcially synthesized peptide
GLISPNVQL

SEQ ID NO: 491 - protein, 9 aa, Artificial Sequence
  Artifcially synthesized peptide
GLISPVWGA

SEQ ID NO: 492 - protein, 11 aa, Artificial Sequence
  Artifcially synthesized peptide
GLITPGGFSSV

SEQ ID NO: 493 - protein, 9 aa, Artificial Sequence
  Artifcially synthesized peptide
GLLDSPTSI

SEQ ID NO: 494 - protein, 9 aa, Artificial Sequence
  Artifcially synthesized peptide
GLLGSPARL

SEQ ID NO: 495 - protein, 9 aa, Artificial Sequence
  Artifcially synthesized peptide
GLLGSPVRA

SEQ ID NO: 496 - protein, 11 aa, Artificial Sequence
  Artifcially synthesized peptide
GLLSPARLYAI

SEQ ID NO: 497 - protein, 11 aa, Artificial Sequence
  Artifcially synthesized peptide
GLLSPARLYAV

SEQ ID NO: 498 - protein, 10 aa, Artificial Sequence
  Artifcially synthesized peptide
GLLSPRFVDV

SEQ ID NO: 499 - protein, 9 aa, Artificial Sequence
  Artifcially synthesized peptide
GLLSPRHSL

SEQ ID NO: 500 - protein, 12 aa, Artificial Sequence
  Artifcially synthesized peptide
GLSFGGRSSGSP

SEQ ID NO: 501 - protein, 12 aa, Artificial Sequence
  Artifcially synthesized peptide
GLSFGGRSSGSV

SEQ ID NO: 502 - protein, 10 aa, Artificial Sequence
  Artifcially synthesized peptide
GLSSLAEEAA

SEQ ID NO: 503 - protein, 9 aa, Artificial Sequence
  Artifcially synthesized peptide
GLSSLSIHL

SEQ ID NO: 504 - protein, 9 aa, Artificial Sequence
  Artifcially synthesized peptide
GLTSPGLSY

SEQ ID NO: 505 - protein, 10 aa, Artificial Sequence
  Artifcially synthesized peptide
GLTSPGLSYS

SEQ ID NO: 506 - protein, 11 aa, Artificial Sequence
  Artifcially synthesized peptide
GLTSPGLSYSL

SEQ ID NO: 507 - protein, 9 aa, Artificial Sequence
  Artifcially synthesized peptide
GMLGSPVRV

SEQ ID NO: 508 - protein, 11 aa, Artificial Sequence
  Artifcially synthesized peptide
GMLSPARLYAI

SEQ ID NO: 509 - protein, 11 aa, Artificial Sequence
  Artifcially synthesized peptide
GMLSPARLYAV

SEQ ID NO: 510 - protein, 11 aa, Artificial Sequence
  Artifcially synthesized peptide
GMLSPGKSIEV

SEQ ID NO: 511 - protein, 15 aa, Artificial Sequence
  Artifcially synthesized peptide
GPGHHHKPGLGEGTP

SEQ ID NO: 512 - protein, 11 aa, Artificial Sequence
  Artifcially synthesized peptide
GPKPLFRRMSS

SEQ ID NO: 513 - protein, 12 aa, Artificial Sequence
  Artifcially synthesized peptide
GPKPLFRRMSSL

SEQ ID NO: 514 - protein, 13 aa, Artificial Sequence
  Artifcially synthesized peptide
GPKPLFRRMSSLV

SEQ ID NO: 515 - protein, 14 aa, Artificial Sequence
  Artifcially synthesized peptide
GPKPLFRRMSSLVG

SEQ ID NO: 516 - protein, 15 aa, Artificial Sequence
  Artifcially synthesized peptide
GPKPLFRRMSSLVGP

SEQ ID NO: 517 - protein, 16 aa, Artificial Sequence
  Artifcially synthesized peptide
GPKPLFRRMSSLVGPT

SEQ ID NO: 518 - protein, 17 aa, Artificial Sequence
  Artifcially synthesized peptide
GPKPLFRRMSSLVGPTQ

SEQ ID NO: 519 - protein, 18 aa, Artificial Sequence
  Artifcially synthesized peptide
GPKPLFRRMSSLVGPTQS

SEQ ID NO: 520 - protein, 9 aa, Artificial Sequence
  Artifcially synthesized peptide
GPLSRVKSL

SEQ ID NO: 521 - protein, 9 aa, Artificial Sequence
  Artifcially synthesized peptide
GPLVRQISL

SEQ ID NO: 522 - protein, 10 aa, Artificial Sequence
  Artifcially synthesized peptide
GPPYQRRGSL

SEQ ID NO: 523 - protein, 9 aa, Artificial Sequence
  Artifcially synthesized peptide
GPQPGRHSF

SEQ ID NO: 524 - protein, 9 aa, Artificial Sequence
  Artifcially synthesized peptide
GPQPGRHSL

SEQ ID NO: 525 - protein, 9 aa, Artificial Sequence
  Artifcially synthesized peptide
GPQPGRHSV

SEQ ID NO: 526 - protein, 11 aa, Artificial Sequence
  Artifcially synthesized peptide
GPRAPSPTKPL

SEQ ID NO: 527 - protein, 10 aa, Artificial Sequence
  Artifcially synthesized peptide
GPRASSLLSL

SEQ ID NO: 528 - protein, 10 aa, Artificial Sequence
  Artifcially synthesized peptide
GPRPGSPSAF

SEQ ID NO: 529 - protein, 10 aa, Artificial Sequence
  Artifcially synthesized peptide
GPRPGSPSAL

SEQ ID NO: 530 - protein, 11 aa, Artificial Sequence
  Artifcially synthesized peptide
GPRPGSPSALL

SEQ ID NO: 531 - protein, 10 aa, Artificial Sequence
  Artifcially synthesized peptide
GPRPGSPSAM

SEQ ID NO: 532 - protein, 10 aa, Artificial Sequence
  Artifcially synthesized peptide
GPRPGSPSAV

SEQ ID NO: 533 - protein, 8 aa, Artificial Sequence
  Artifcially synthesized peptide
GPRSASLL

SEQ ID NO: 534 - protein, 10 aa, Artificial Sequence
  Artifcially synthesized peptide
GPRSASLLSF

SEQ ID NO: 535 - protein, 10 aa, Artificial Sequence
  Artifcially synthesized peptide
GPRSASLLSL

SEQ ID NO: 536 - protein, 10 aa, Artificial Sequence
  Artifcially synthesized peptide
GPRSASLLSM

SEQ ID NO: 537 - protein, 10 aa, Artificial Sequence
  Artifcially synthesized peptide
GPRSASLLSV

SEQ ID NO: 538 - protein, 9 aa, Artificial Sequence
  Artifcially synthesized peptide
GPRSPKAPP

SEQ ID NO: 539 - protein, 9 aa, Artificial Sequence
  Artifcially synthesized peptide
GPRSPPVTL

SEQ ID NO: 540 - protein, 9 aa, Artificial Sequence
  Artifcially synthesized peptide
GPSSPWTQL

SEQ ID NO: 541 - protein, 9 aa, Artificial Sequence
  Artifcially synthesized peptide
GQLSPGVQF

SEQ ID NO: 542 - protein, 9 aa, Artificial Sequence
  Artifcially synthesized peptide
GRKSPPPSF

SEQ ID NO: 543 - protein, 9 aa, Artificial Sequence
  Artifcially synthesized peptide
GRKSPPPSK

SEQ ID NO: 544 - protein, 9 aa, Artificial Sequence
  Artifcially synthesized peptide
GRKSPPPSL

SEQ ID NO: 545 - protein, 9 aa, Artificial Sequence
  Artifcially synthesized peptide
GRKSPPPSM

SEQ ID NO: 546 - protein, 9 aa, Artificial Sequence
  Artifcially synthesized peptide
GRKSPPPSR

SEQ ID NO: 547 - protein, 9 aa, Artificial Sequence
  Artifcially synthesized peptide
GRKSPPPSY

SEQ ID NO: 548 - protein, 9 aa, Artificial Sequence
  Artifcially synthesized peptide
GRLGSPHRF

SEQ ID NO: 549 - protein, 9 aa, Artificial Sequence
  Artifcially synthesized peptide
GRLGSPHRK

SEQ ID NO: 550 - protein, 9 aa, Artificial Sequence
  Artifcially synthesized peptide
GRLGSPHRL

SEQ ID NO: 551 - protein, 9 aa, Artificial Sequence
  Artifcially synthesized peptide
GRLGSPHRM

SEQ ID NO: 552 - protein, 9 aa, Artificial Sequence
  Artifcially synthesized peptide
GRLGSPHRR

SEQ ID NO: 553 - protein, 9 aa, Artificial Sequence
  Artifcially synthesized peptide
GRLGSPHRY

SEQ ID NO: 554 - protein, 9 aa, Artificial Sequence
  Artifcially synthesized peptide
GRLSPAYSL

SEQ ID NO: 555 - protein, 11 aa, Artificial Sequence
  Artifcially synthesized peptide
GRLSPKASQVF

SEQ ID NO: 556 - protein, 11 aa, Artificial Sequence
  Artifcially synthesized peptide
GRLSPKASQVK

SEQ ID NO: 557 - protein, 11 aa, Artificial Sequence
  Artifcially synthesized peptide
GRLSPKASQVL

SEQ ID NO: 558 - protein, 11 aa, Artificial Sequence
  Artifcially synthesized peptide
GRLSPKASQVM

SEQ ID NO: 559 - protein, 11 aa, Artificial Sequence
  Artifcially synthesized peptide
GRLSPKASQVR

SEQ ID NO: 560 - protein, 11 aa, Artificial Sequence
  Artifcially synthesized peptide
GRLSPKASQVY

SEQ ID NO: 561 - protein, 10 aa, Artificial Sequence
  Artifcially synthesized peptide
GRLSPVPVPF

SEQ ID NO: 562 - protein, 10 aa, Artificial Sequence
  Artifcially synthesized peptide
GRLSPVPVPK

SEQ ID NO: 563 - protein, 10 aa, Artificial Sequence
  Artifcially synthesized peptide
GRLSPVPVPL

SEQ ID NO: 564 - protein, 10 aa, Artificial Sequence
  Artifcially synthesized peptide
GRLSPVPVPM

SEQ ID NO: 565 - protein, 10 aa, Artificial Sequence
  Artifcially synthesized peptide
GRLSPVPVPR

SEQ ID NO: 566 - protein, 10 aa, Artificial Sequence
  Artifcially synthesized peptide
GRLSPVPVPY

SEQ ID NO: 567 - protein, 9 aa, Artificial Sequence
  Artifcially synthesized peptide
GRQSPSFKL

SEQ ID NO: 568 - protein, 9 aa, Artificial Sequence
  Artifcially synthesized peptide
GRSSPPPGY

SEQ ID NO: 569 - protein, 11 aa, Artificial Sequence
  Artifcially synthesized peptide
GRSSTASLVKF

SEQ ID NO: 570 - protein, 11 aa, Artificial Sequence
  Artifcially synthesized peptide
GRSSTASLVKK

SEQ ID NO: 571 - protein, 12 aa, Artificial Sequence
  Artifcially synthesized peptide
GRSSTASLVKKK

SEQ ID NO: 572 - protein, 11 aa, Artificial Sequence
  Artifcially synthesized peptide
GRSSTASLVKL

SEQ ID NO: 573 - protein, 11 aa, Artificial Sequence
  Artifcially synthesized peptide
GRSSTASLVKM

SEQ ID NO: 574 - protein, 11 aa, Artificial Sequence
  Artifcially synthesized peptide
GRSSTASLVKR

SEQ ID NO: 575 - protein, 11 aa, Artificial Sequence
  Artifcially synthesized peptide
GRSSTASLVKR

SEQ ID NO: 576 - protein, 11 aa, Artificial Sequence
  Artifcially synthesized peptide
GRSSTASLVKY

SEQ ID NO: 577 - protein, 28 aa, Artificial Sequence
  Artifcially synthesized peptide
GSALGGGGAGLSGRASGGAQSPLRYLHV

SEQ ID NO: 578 - protein, 9 aa, Artificial Sequence
  Artifcially synthesized peptide
GSDSPRSSL

SEQ ID NO: 579 - protein, 11 aa, Artificial Sequence
  Artifcially synthesized peptide
GSDSSDDGKKY

SEQ ID NO: 580 - protein, 11 aa, Artificial Sequence
  Artifcially synthesized peptide
GSDVSLTACKV

SEQ ID NO: 581 - protein, 11 aa, Artificial Sequence
  Artifcially synthesized peptide
GSESSDDGKKY

SEQ ID NO: 582 - protein, 9 aa, Artificial Sequence
  Artifcially synthesized peptide
GSGPEIFTF

SEQ ID NO: 583 - protein, 9 aa, Artificial Sequence
  Artifcially synthesized peptide
GSKSPISQL

SEQ ID NO: 584 - protein, 9 aa, Artificial Sequence
  Artifcially synthesized peptide
GSPHYFSPF

SEQ ID NO: 585 - protein, 11 aa, Artificial Sequence
  Artifcially synthesized peptide
GSPHYFSPFRP

SEQ ID NO: 586 - protein, 12 aa, Artificial Sequence
  Artifcially synthesized peptide
GSPHYFSPFRPY

SEQ ID NO: 587 - protein, 8 aa, Artificial Sequence
  Artifcially synthesized peptide
GSPIKVTL

SEQ ID NO: 588 - protein, 9 aa, Artificial Sequence
  Artifcially synthesized peptide
GSPIKVTLA

SEQ ID NO: 589 - protein, 17 aa, Artificial Sequence
  Artifcially synthesized peptide
GSPTMVEKGLEPGVFTL

SEQ ID NO: 590 - protein, 10 aa, Artificial Sequence
  Artifcially synthesized peptide
GSQLAVMMYL

SEQ ID NO: 591 - protein, 11 aa, Artificial Sequence
  Artifcially synthesized peptide
GTDSSDDGKKY

SEQ ID NO: 592 - protein, 11 aa, Artificial Sequence
  Artifcially synthesized peptide
GTESSDDGKKY

SEQ ID NO: 593 - protein, 9 aa, Artificial Sequence
  Artifcially synthesized peptide
GTFPKALSI

SEQ ID NO: 594 - protein, 11 aa, Artificial Sequence
  Artifcially synthesized peptide
GTIRSRSFIFK

SEQ ID NO: 595 - protein, 11 aa, Artificial Sequence
  Artifcially synthesized peptide
GTIRSRSFIFY

SEQ ID NO: 596 - protein, 9 aa, Artificial Sequence
  Artifcially synthesized peptide
GTISPTSSL

SEQ ID NO: 597 - protein, 6 aa, Artificial Sequence
  Artifcially synthesized peptide
GTLPKY

SEQ ID NO: 598 - protein, 13 aa, Artificial Sequence
  Artifcially synthesized peptide
GTLRRSDSQQAVK

SEQ ID NO: 599 - protein, 14 aa, Artificial Sequence
  Artifcially synthesized peptide
GTLRRSDSQQAVKS

SEQ ID NO: 600 - protein, 16 aa, Artificial Sequence
  Artifcially synthesized peptide
GTLRRSDSQQAVKSPP

SEQ ID NO: 601 - protein, 12 aa, Artificial Sequence
  Artifcially synthesized peptide
GTPLSQAIIHQY

SEQ ID NO: 602 - protein, 9 aa, Artificial Sequence
  Artifcially synthesized peptide
GTVTPALKL

SEQ ID NO: 603 - protein, 13 aa, Artificial Sequence
  Artifcially synthesized peptide
GTYVPSSPTRLAY

SEQ ID NO: 604 - protein, 9 aa, Artificial Sequence
  Artifcially synthesized peptide
GVASPTITV

SEQ ID NO: 605 - protein, 10 aa, Artificial Sequence
  Artifcially synthesized peptide
GVISPQELLK

SEQ ID NO: 606 - protein, 11 aa, Artificial Sequence
  Artifcially synthesized peptide
GVISPQELLKK

SEQ ID NO: 607 - protein, 11 aa, Artificial Sequence
  Artifcially synthesized peptide
GVISPRFDVQL

SEQ ID NO: 608 - protein, 9 aa, Artificial Sequence
  Artifcially synthesized peptide
GVVSPTFEL

SEQ ID NO: 609 - protein, 12 aa, Artificial Sequence
  Artifcially synthesized peptide
GYVQRNLSLVRG

SEQ ID NO: 610 - protein, 9 aa, Artificial Sequence
  Artifcially synthesized peptide
HAVSPIAKY

SEQ ID NO: 611 - protein, 9 aa, Artificial Sequence
  Artifcially synthesized peptide
HEFMSDTNL

SEQ ID NO: 612 - protein, 8 aa, Artificial Sequence
  Artifcially synthesized peptide
HEKKAYSF

SEQ ID NO: 613 - protein, 9 aa, Artificial Sequence
  Artifcially synthesized peptide
HERGSLASL

SEQ ID NO: 614 - protein, 12 aa, Artificial Sequence
  Artifcially synthesized peptide
HHHKPGLGEGTP

SEQ ID NO: 615 - protein, 11 aa, Artificial Sequence
  Artifcially synthesized peptide
HHKPGLGEGTP

SEQ ID NO: 616 - protein, 9 aa, Artificial Sequence
  Artifcially synthesized peptide
HIPSPAKKV

SEQ ID NO: 617 - protein, 19 aa, Artificial Sequence
  Artifcially synthesized peptide
HKGEIRGASTPFQFRASSP

SEQ ID NO: 618 - protein, 10 aa, Artificial Sequence
  Artifcially synthesized peptide
HKPGLGEGTP

SEQ ID NO: 619 - protein, 9 aa, Artificial Sequence
  Artifcially synthesized peptide
HLHSPQHKL

SEQ ID NO: 620 - protein, 9 aa, Artificial Sequence
  Artifcially synthesized peptide
HLYTSLPSL

SEQ ID NO: 621 - protein, 10 aa, Artificial Sequence
  Artifcially synthesized peptide
HPFHATPNTY

SEQ ID NO: 622 - protein, 8 aa, Artificial Sequence
  Artifcially synthesized peptide
HPKRSVSL

SEQ ID NO: 623 - protein, 9 aa, Artificial Sequence
  Artifcially synthesized peptide
HPLTPLITY

SEQ ID NO: 624 - protein, 9 aa, Artificial Sequence
  Artifcially synthesized peptide
HPMSTASQV

SEQ ID NO: 625 - protein, 9 aa, Artificial Sequence
  Artifcially synthesized peptide
HPRPTSQDL

SEQ ID NO: 626 - protein, 8 aa, Artificial Sequence
  Artifcially synthesized peptide
HPRSPNVL

SEQ ID NO: 627 - protein, 10 aa, Artificial Sequence
  Artifcially synthesized peptide
HPRSPNVLSF

SEQ ID NO: 628 - protein, 10 aa, Artificial Sequence
  Artifcially synthesized peptide
HPRSPNVLSL

SEQ ID NO: 629 - protein, 10 aa, Artificial Sequence
  Artifcially synthesized peptide
HPRSPNVLSM

SEQ ID NO: 630 - protein, 10 aa, Artificial Sequence
  Artifcially synthesized peptide
HPRSPNVLSV

SEQ ID NO: 631 - protein, 9 aa, Artificial Sequence
  Artifcially synthesized peptide
HPRSPTPTF

SEQ ID NO: 632 - protein, 9 aa, Artificial Sequence
  Artifcially synthesized peptide
HPRSPTPTL

SEQ ID NO: 633 - protein, 9 aa, Artificial Sequence
  Artifcially synthesized peptide
HPRSPTPTM

SEQ ID NO: 634 - protein, 9 aa, Artificial Sequence
  Artifcially synthesized peptide
HPRSPTPTV

SEQ ID NO: 635 - protein, 9 aa, Artificial Sequence
  Artifcially synthesized peptide
HPSSSAAVL

SEQ ID NO: 636 - protein, 10 aa, Artificial Sequence
  Artifcially synthesized peptide
HPSSTASTAL

SEQ ID NO: 637 - protein, 8 aa, Artificial Sequence
  Artifcially synthesized peptide
HPTTVASY

SEQ ID NO: 638 - protein, 9 aa, Artificial Sequence
  Artifcially synthesized peptide
HPYSPLPGL

SEQ ID NO: 639 - protein, 9 aa, Artificial Sequence
  Artifcially synthesized peptide
HQGKFLQTF

SEQ ID NO: 640 - protein, 10 aa, Artificial Sequence
  Artifcially synthesized peptide
HRFSINGHFY

SEQ ID NO: 641 - protein, 10 aa, Artificial Sequence
  Artifcially synthesized peptide
HRLSPVKGEF

SEQ ID NO: 642 - protein, 10 aa, Artificial Sequence
  Artifcially synthesized peptide
HRLSPVKGEK

SEQ ID NO: 643 - protein, 10 aa, Artificial Sequence
  Artifcially synthesized peptide
HRLSPVKGER

SEQ ID NO: 644 - protein, 10 aa, Artificial Sequence
  Artifcially synthesized peptide
HRLSPVKGEY

SEQ ID NO: 645 - protein, 9 aa, Artificial Sequence
  Artifcially synthesized peptide
HRNSMKVFL

SEQ ID NO: 646 - protein, 11 aa, Artificial Sequence
  Artifcially synthesized peptide
HRNSNPVIAEF

SEQ ID NO: 647 - protein, 11 aa, Artificial Sequence
  Artifcially synthesized peptide
HRNSNPVIAEK

SEQ ID NO: 648 - protein, 11 aa, Artificial Sequence
  Artifcially synthesized peptide
HRNSNPVIAEL

SEQ ID NO: 649 - protein, 11 aa, Artificial Sequence
  Artifcially synthesized peptide
HRNSNPVIAEM

SEQ ID NO: 650 - protein, 11 aa, Artificial Sequence
  Artifcially synthesized peptide
HRNSNPVIAER

SEQ ID NO: 651 - protein, 11 aa, Artificial Sequence
  Artifcially synthesized peptide
HRNSNPVIAEY

SEQ ID NO: 652 - protein, 9 aa, Artificial Sequence
  Artifcially synthesized peptide
HRVSVILKL

SEQ ID NO: 653 - protein, 9 aa, Artificial Sequence
  Artifcially synthesized peptide
HRYSTPHAF

SEQ ID NO: 654 - protein, 12 aa, Artificial Sequence
  Artifcially synthesized peptide
HRYPTSIASLAF

SEQ ID NO: 655 - protein, 9 aa, Artificial Sequence
  Artifcially synthesized peptide
HRYSTPHAF

SEQ ID NO: 656 - protein, 10 aa, Artificial Sequence
  Artifcially synthesized peptide
HTASPTGMMK

SEQ ID NO: 657 - protein, 9 aa, Artificial Sequence
  Artifcially synthesized peptide
HTFSPSPKL

SEQ ID NO: 658 - protein, 8 aa, Artificial Sequence
  Artifcially synthesized peptide
HTISPLDL

SEQ ID NO: 659 - protein, 9 aa, Artificial Sequence
  Artifcially synthesized peptide
HTISPSFQL

SEQ ID NO: 660 - protein, 10 aa, Artificial Sequence
  Artifcially synthesized peptide
HVSLITPTKR

SEQ ID NO: 661 - protein, 9 aa, Artificial Sequence
  Artifcially synthesized peptide
HVYTPSTTK

SEQ ID NO: 662 - protein, 9 aa, Artificial Sequence
  Artifcially synthesized peptide
HYSSLVRVL

SEQ ID NO: 663 - protein, 11 aa, Artificial Sequence
  Artifcially synthesized peptide
HYSSRLGSAIF

SEQ ID NO: 664 - protein, 8 aa, Artificial Sequence
  Artifcially synthesized peptide
IADDRQSL

SEQ ID NO: 665 - protein, 9 aa, Artificial Sequence
  Artifcially synthesized peptide
IAKSPHSTV

SEQ ID NO: 666 - protein, 9 aa, Artificial Sequence
  Artifcially synthesized peptide
IAQDHRSSL

SEQ ID NO: 667 - protein, 15 aa, Artificial Sequence
  Artifcially synthesized peptide
IEKIYIMKADTVIVG

SEQ ID NO: 668 - protein, 9 aa, Artificial Sequence
  Artifcially synthesized peptide
IGKMRYVSV

SEQ ID NO: 669 - protein, 9 aa, Artificial Sequence
  Artifcially synthesized peptide
IIETPHKEI

SEQ ID NO: 670 - protein, 9 aa, Artificial Sequence
  Artifcially synthesized peptide
IIETPHKEY

SEQ ID NO: 671 - protein, 9 aa, Artificial Sequence
  Artifcially synthesized peptide
IIHSLETKL

SEQ ID NO: 672 - protein, 12 aa, Artificial Sequence
  Artifcially synthesized peptide
IIQSPSSTGLLK

SEQ ID NO: 673 - protein, 9 aa, Artificial Sequence
  Artifcially synthesized peptide
IISSPLKGY

SEQ ID NO: 674 - protein, 9 aa, Artificial Sequence
  Artifcially synthesized peptide
IISSPLTGK

SEQ ID NO: 675 - protein, 9 aa, Artificial Sequence
  Artifcially synthesized peptide
ILDISEHTL

SEQ ID NO: 676 - protein, 9 aa, Artificial Sequence
  Artifcially synthesized peptide
ILDRTPEKL

SEQ ID NO: 677 - protein, 9 aa, Artificial Sequence
  Artifcially synthesized peptide
ILDRTPEKV

SEQ ID NO: 678 - protein, 9 aa, Artificial Sequence
  Artifcially synthesized peptide
ILDSGIYRI

SEQ ID NO: 679 - protein, 9 aa, Artificial Sequence
  Artifcially synthesized peptide
ILDSGIYRV

SEQ ID NO: 680 - protein, 11 aa, Artificial Sequence
  Artifcially synthesized peptide
ILGPPPPSFHL

SEQ ID NO: 681 - protein, 8 aa, Artificial Sequence
  Artifcially synthesized peptide
ILKPRRSL

SEQ ID NO: 682 - protein, 10 aa, Artificial Sequence
  Artifcially synthesized peptide
ILKSPEIQRA

SEQ ID NO: 683 - protein, 10 aa, Artificial Sequence
  Artifcially synthesized peptide
ILKSPEIQRV

SEQ ID NO: 684 - protein, 9 aa, Artificial Sequence
  Artifcially synthesized peptide
ILQTPQFQM

SEQ ID NO: 685 - protein, 9 aa, Artificial Sequence
  Artifcially synthesized peptide
ILQVSIPSL

SEQ ID NO: 686 - protein, 9 aa, Artificial Sequence
  Artifcially synthesized peptide
ILYPRPKSL

SEQ ID NO: 687 - protein, 9 aa, Artificial Sequence
  Artifcially synthesized peptide
IMDRTPEKL

SEQ ID NO: 688 - protein, 9 aa, Artificial Sequence
  Artifcially synthesized peptide
IMDRTPEKV

SEQ ID NO: 689 - protein, 9 aa, Artificial Sequence
  Artifcially synthesized peptide
IMDSGIYRI

SEQ ID NO: 690 - protein, 9 aa, Artificial Sequence
  Artifcially synthesized peptide
IMDSGIYRV

SEQ ID NO: 691 - protein, 10 aa, Artificial Sequence
  Artifcially synthesized peptide
IMKSPEIQRA

SEQ ID NO: 692 - protein, 10 aa, Artificial Sequence
  Artifcially synthesized peptide
IMKSPEIQRV

SEQ ID NO: 693 - protein, 9 aa, Artificial Sequence
  Artifcially synthesized peptide
INKERRSSL

SEQ ID NO: 694 - protein, 9 aa, Artificial Sequence
  Artifcially synthesized peptide
IPAPPSSPL

SEQ ID NO: 695 - protein, 8 aa, Artificial Sequence
  Artifcially synthesized peptide
IPHQRSSL

SEQ ID NO: 696 - protein, 9 aa, Artificial Sequence
  Artifcially synthesized peptide
IPISLHTSL

SEQ ID NO: 697 - protein, 9 aa, Artificial Sequence
  Artifcially synthesized peptide
IPKSKFLAL

SEQ ID NO: 698 - protein, 9 aa, Artificial Sequence
  Artifcially synthesized peptide
IPLSKIKTL

SEQ ID NO: 699 - protein, 12 aa, Artificial Sequence
  Artifcially synthesized peptide
IPRPLSLIGSTL

SEQ ID NO: 700 - protein, 11 aa, Artificial Sequence
  Artifcially synthesized peptide
IPRSPFKVKVL

SEQ ID NO: 701 - protein, 11 aa, Artificial Sequence
  Artifcially synthesized peptide
IPRTPLSPSPM

SEQ ID NO: 702 - protein, 10 aa, Artificial Sequence
  Artifcially synthesized peptide
IPSSPQKVAL

SEQ ID NO: 703 - protein, 9 aa, Artificial Sequence
  Artifcially synthesized peptide
IPTSPTSKY

SEQ ID NO: 704 - protein, 9 aa, Artificial Sequence
  Artifcially synthesized peptide
IPTSSVLSL

SEQ ID NO: 705 - protein, 9 aa, Artificial Sequence
  Artifcially synthesized peptide
IPVSKPLSL

SEQ ID NO: 706 - protein, 9 aa, Artificial Sequence
  Artifcially synthesized peptide
IPVSKPLSL

SEQ ID NO: 707 - protein, 8 aa, Artificial Sequence
  Artifcially synthesized peptide
IPVSPHIY

SEQ ID NO: 708 - protein, 9 aa, Artificial Sequence
  Artifcially synthesized peptide
IPVSSHNSL

SEQ ID NO: 709 - protein, 9 aa, Artificial Sequence
  Artifcially synthesized peptide
IPVSSHNSL

SEQ ID NO: 710 - protein, 11 aa, Artificial Sequence
  Artifcially synthesized peptide
IPYAPSGEIPK

SEQ ID NO: 711 - protein, 10 aa, Artificial Sequence
  Artifcially synthesized peptide
IQFSPPFPGA

SEQ ID NO: 712 - protein, 9 aa, Artificial Sequence
  Artifcially synthesized peptide
IRASLTKHF

SEQ ID NO: 713 - protein, 8 aa, Artificial Sequence
  Artifcially synthesized peptide
IRFGRKPS

SEQ ID NO: 714 - protein, 9 aa, Artificial Sequence
  Artifcially synthesized peptide
IRFGRKPSL

SEQ ID NO: 715 - protein, 9 aa, Artificial Sequence
  Artifcially synthesized peptide
IRGSKIRFL

SEQ ID NO: 716 - protein, 9 aa, Artificial Sequence
  Artifcially synthesized peptide
IRKERPISL

SEQ ID NO: 717 - protein, 9 aa, Artificial Sequence
  Artifcially synthesized peptide
IRNSQTRKI

SEQ ID NO: 718 - protein, 9 aa, Artificial Sequence
  Artifcially synthesized peptide
IRSSYIRVL

SEQ ID NO: 719 - protein, 8 aa, Artificial Sequence
  Artifcially synthesized peptide
IRYSGHSL

SEQ ID NO: 720 - protein, 8 aa, Artificial Sequence
  Artifcially synthesized peptide
ISDGTLKY

SEQ ID NO: 721 - protein, 9 aa, Artificial Sequence
  Artifcially synthesized peptide
ISDGTPLKY

SEQ ID NO: 722 - protein, 9 aa, Artificial Sequence
  Artifcially synthesized peptide
ISDSAHTDY

SEQ ID NO: 723 - protein, 9 aa, Artificial Sequence
  Artifcially synthesized peptide
ISDSMHSLY

SEQ ID NO: 724 - protein, 9 aa, Artificial Sequence
  Artifcially synthesized peptide
ISDTPHKEI

SEQ ID NO: 725 - protein, 9 aa, Artificial Sequence
  Artifcially synthesized peptide
ISDTPHKEY

SEQ ID NO: 726 - protein, 8 aa, Artificial Sequence
  Artifcially synthesized peptide
ISEGTLKY

SEQ ID NO: 727 - protein, 9 aa, Artificial Sequence
  Artifcially synthesized peptide
ISEGTPLKY

SEQ ID NO: 728 - protein, 9 aa, Artificial Sequence
  Artifcially synthesized peptide
ISESAHTDY

SEQ ID NO: 729 - protein, 9 aa, Artificial Sequence
  Artifcially synthesized peptide
ISESMHSLY

SEQ ID NO: 730 - protein, 9 aa, Artificial Sequence
  Artifcially synthesized peptide
ISETPHKEI

SEQ ID NO: 731 - protein, 9 aa, Artificial Sequence
  Artifcially synthesized peptide
ISETPHKEY

SEQ ID NO: 732 - protein, 9 aa, Artificial Sequence
  Artifcially synthesized peptide
ISFSAHTDY

SEQ ID NO: 733 - protein, 9 aa, Artificial Sequence
  Artifcially synthesized peptide
ISIDSPQKL

SEQ ID NO: 734 - protein, 9 aa, Artificial Sequence
  Artifcially synthesized peptide
ISNSHPLSL

SEQ ID NO: 735 - protein, 9 aa, Artificial Sequence
  Artifcially synthesized peptide
ISSSMHSLY

SEQ ID NO: 736 - protein, 8 aa, Artificial Sequence
  Artifcially synthesized peptide
ISTDRDPL

SEQ ID NO: 737 - protein, 8 aa, Artificial Sequence
  Artifcially synthesized peptide
ISTDRDPY

SEQ ID NO: 738 - protein, 9 aa, Artificial Sequence
  Artifcially synthesized peptide
ISTSPSVAL

SEQ ID NO: 739 - protein, 9 aa, Artificial Sequence
  Artifcially synthesized peptide
ISTSPSVAL

SEQ ID NO: 740 - protein, 11 aa, Artificial Sequence
  Artifcially synthesized peptide
ISVSPLATSAL

SEQ ID NO: 741 - protein, 9 aa, Artificial Sequence
  Artifcially synthesized peptide
ISVSRSTSF

SEQ ID NO: 742 - protein, 8 aa, Artificial Sequence
  Artifcially synthesized peptide
ITDGTLKY

SEQ ID NO: 743 - protein, 9 aa, Artificial Sequence
  Artifcially synthesized peptide
ITDGTPLKY

SEQ ID NO: 744 - protein, 11 aa, Artificial Sequence
  Artifcially synthesized peptide
ITDLPDHLLSY

SEQ ID NO: 745 - protein, 9 aa, Artificial Sequence
  Artifcially synthesized peptide
ITDSAHTDY

SEQ ID NO: 746 - protein, 9 aa, Artificial Sequence
  Artifcially synthesized peptide
ITDSMHSLY

SEQ ID NO: 747 - protein, 9 aa, Artificial Sequence
  Artifcially synthesized peptide
ITDTPHKEI

SEQ ID NO: 748 - protein, 9 aa, Artificial Sequence
  Artifcially synthesized peptide
ITDTPHKEY

SEQ ID NO: 749 - protein, 8 aa, Artificial Sequence
  Artifcially synthesized peptide
ITEGTLKY

SEQ ID NO: 750 - protein, 9 aa, Artificial Sequence
  Artifcially synthesized peptide
ITEGTPLKY

SEQ ID NO: 751 - protein, 9 aa, Artificial Sequence
  Artifcially synthesized peptide
ITESAHTDY

SEQ ID NO: 752 - protein, 9 aa, Artificial Sequence
  Artifcially synthesized peptide
ITESMHSLY

SEQ ID NO: 753 - protein, 9 aa, Artificial Sequence
  Artifcially synthesized peptide
ITETPHKEI

SEQ ID NO: 754 - protein, 9 aa, Artificial Sequence
  Artifcially synthesized peptide
ITETPHKEY

SEQ ID NO: 755 - protein, 9 aa, Artificial Sequence
  Artifcially synthesized peptide
ITITPPDRY

SEQ ID NO: 756 - protein, 8 aa, Artificial Sequence
  Artifcially synthesized peptide
ITQGTLKY

SEQ ID NO: 757 - protein, 9 aa, Artificial Sequence
  Artifcially synthesized peptide
ITQGTPLKK

SEQ ID NO: 758 - protein, 9 aa, Artificial Sequence
  Artifcially synthesized peptide
ITQGTPLKY

SEQ ID NO: 759 - protein, 8 aa, Artificial Sequence
  Artifcially synthesized peptide
ITTDRDPL

SEQ ID NO: 760 - protein, 8 aa, Artificial Sequence
  Artifcially synthesized peptide
ITTDRDPY

SEQ ID NO: 761 - protein, 10 aa, Artificial Sequence
  Artifcially synthesized peptide
ITTSPITVRK

SEQ ID NO: 762 - protein, 9 aa, Artificial Sequence
  Artifcially synthesized peptide
ITYMSPAKL

SEQ ID NO: 763 - protein, 8 aa, Artificial Sequence
  Artifcially synthesized peptide
IVDSPEKL

SEQ ID NO: 764 - protein, 11 aa, Artificial Sequence
  Artifcially synthesized peptide
IVLSDSEVIQL

SEQ ID NO: 765 - protein, 7 aa, Artificial Sequence
  Artifcially synthesized peptide
IVRYHQL

SEQ ID NO: 766 - protein, 9 aa, Artificial Sequence
  Artifcially synthesized peptide
IVSSLRLAY

SEQ ID NO: 767 - protein, 8 aa, Artificial Sequence
  Artifcially synthesized peptide
IVTDRDPL

SEQ ID NO: 768 - protein, 8 aa, Artificial Sequence
  Artifcially synthesized peptide
IVTDRDPY

SEQ ID NO: 769 - protein, 9 aa, Artificial Sequence
  Artifcially synthesized peptide
IYQYIQSRF

SEQ ID NO: 770 - protein, 10 aa, Artificial Sequence
  Artifcially synthesized peptide
IYRSQSPHYF

SEQ ID NO: 771 - protein, 9 aa, Artificial Sequence
  Artifcially synthesized peptide
IYYKSMPNL

SEQ ID NO: 772 - protein, 9 aa, Artificial Sequence
  Artifcially synthesized peptide
IYYQSPLSL

SEQ ID NO: 773 - protein, 10 aa, Artificial Sequence
  Artifcially synthesized peptide
KADSLEVQQM

SEQ ID NO: 774 - protein, 10 aa, Artificial Sequence
  Artifcially synthesized peptide
KADTVSKTEL

SEQ ID NO: 775 - protein, 7 aa, Artificial Sequence
  Artifcially synthesized peptide
KAFSPVR

SEQ ID NO: 776 - protein, 8 aa, Artificial Sequence
  Artifcially synthesized peptide
KAFSPVRS

SEQ ID NO: 777 - protein, 9 aa, Artificial Sequence
  Artifcially synthesized peptide
KAFSPVRSV

SEQ ID NO: 778 - protein, 9 aa, Artificial Sequence
  Artifcially synthesized peptide
KAFSPVRSV

SEQ ID NO: 779 - protein, 10 aa, Artificial Sequence
  Artifcially synthesized peptide
KAFSPVRSVR

SEQ ID NO: 780 - protein, 11 aa, Artificial Sequence
  Artifcially synthesized peptide
KAFSPVRSVRK

SEQ ID NO: 781 - protein, 9 aa, Artificial Sequence
  Artifcially synthesized peptide
KAKSPAPGL

SEQ ID NO: 782 - protein, 9 aa, Artificial Sequence
  Artifcially synthesized peptide
KAKSPAPGV

SEQ ID NO: 783 - protein, 9 aa, Artificial Sequence
  Artifcially synthesized peptide
KAPSPPPLL

SEQ ID NO: 784 - protein, 9 aa, Artificial Sequence
  Artifcially synthesized peptide
KAPSRQISL

SEQ ID NO: 785 - protein, 9 aa, Artificial Sequence
  Artifcially synthesized peptide
KARSPGRAF

SEQ ID NO: 786 - protein, 9 aa, Artificial Sequence
  Artifcially synthesized peptide
KARSPGRAL

SEQ ID NO: 787 - protein, 9 aa, Artificial Sequence
  Artifcially synthesized peptide
KARSPGRAM

SEQ ID NO: 788 - protein, 9 aa, Artificial Sequence
  Artifcially synthesized peptide
KARSPGRAV

SEQ ID NO: 789 - protein, 9 aa, Artificial Sequence
  Artifcially synthesized peptide
KASPKRLSL

SEQ ID NO: 790 - protein, 9 aa, Artificial Sequence
  Artifcially synthesized peptide
KAVSLFLCY

SEQ ID NO: 791 - protein, 9 aa, Artificial Sequence
  Artifcially synthesized peptide
KAVSLFLCY

SEQ ID NO: 792 - protein, 9 aa, Artificial Sequence
  Artifcially synthesized peptide
KEDSDEVHL

SEQ ID NO: 793 - protein, 24 aa, Artificial Sequence
  Artifcially synthesized peptide
KEGEEPTVYSDEEEPKDESARKND

SEQ ID NO: 794 - protein, 9 aa, Artificial Sequence
  Artifcially synthesized peptide
KEKSPFRET

SEQ ID NO: 795 - protein, 9 aa, Artificial Sequence
  Artifcially synthesized peptide
KEKTIHLTL

SEQ ID NO: 796 - protein, 9 aa, Artificial Sequence
  Artifcially synthesized peptide
KELARQISF

SEQ ID NO: 797 - protein, 9 aa, Artificial Sequence
  Artifcially synthesized peptide
KELSPAGSI

SEQ ID NO: 798 - protein, 9 aa, Artificial Sequence
  Artifcially synthesized peptide
KEMSPTRQF

SEQ ID NO: 799 - protein, 9 aa, Artificial Sequence
  Artifcially synthesized peptide
KEMSPTRQL

SEQ ID NO: 800 - protein, 9 aa, Artificial Sequence
  Artifcially synthesized peptide
KEMSPTRQW

SEQ ID NO: 801 - protein, 9 aa, Artificial Sequence
  Artifcially synthesized peptide
KEMSPTRQY

SEQ ID NO: 802 - protein, 9 aa, Artificial Sequence
  Artifcially synthesized peptide
KEQSPEPHL

SEQ ID NO: 803 - protein, 11 aa, Artificial Sequence
  Artifcially synthesized peptide
KESSPLSSRKI

SEQ ID NO: 804 - protein, 9 aa, Artificial Sequence
  Artifcially synthesized peptide
KESTLHLVL

SEQ ID NO: 805 - protein, 9 aa, Artificial Sequence
  Artifcially synthesized peptide
KETPDKVEL

SEQ ID NO: 806 - protein, 13 aa, Artificial Sequence
  Artifcially synthesized peptide
KEVDPSTGELQSL

SEQ ID NO: 807 - protein, 10 aa, Artificial Sequence
  Artifcially synthesized peptide
KFLSPAQYLY

SEQ ID NO: 808 - protein, 8 aa, Artificial Sequence
  Artifcially synthesized peptide
KFSPVRSV

SEQ ID NO: 809 - protein, 9 aa, Artificial Sequence
  Artifcially synthesized peptide
KGFSGTFQL

SEQ ID NO: 810 - protein, 11 aa, Artificial Sequence
  Artifcially synthesized peptide
KGISSSSLKEK

SEQ ID NO: 811 - protein, 9 aa, Artificial Sequence
  Artifcially synthesized peptide
KIASEIAQL

SEQ ID NO: 812 - protein, 8 aa, Artificial Sequence
  Artifcially synthesized peptide
KIDSPTKV

SEQ ID NO: 813 - protein, 9 aa, Artificial Sequence
  Artifcially synthesized peptide
KIDSPTKVK

SEQ ID NO: 814 - protein, 10 aa, Artificial Sequence
  Artifcially synthesized peptide
KIDSPTKVKK

SEQ ID NO: 815 - protein, 16 aa, Artificial Sequence
  Artifcially synthesized peptide
KIEKIYIMKADTVIVG

SEQ ID NO: 816 - protein, 10 aa, Artificial Sequence
  Artifcially synthesized peptide
KIESLENLYL

SEQ ID NO: 817 - protein, 9 aa, Artificial Sequence
  Artifcially synthesized peptide
KIFSGVFVK

SEQ ID NO: 818 - protein, 10 aa, Artificial Sequence
  Artifcially synthesized peptide
KIFSGVFVKV

SEQ ID NO: 819 - protein, 9 aa, Artificial Sequence
  Artifcially synthesized peptide
KIFSKQQGK

SEQ ID NO: 820 - protein, 9 aa, Artificial Sequence
  Artifcially synthesized peptide
KIFSKQQGY

SEQ ID NO: 821 - protein, 9 aa, Artificial Sequence
  Artifcially synthesized peptide
KIGSIIFQV

SEQ ID NO: 822 - protein, 9 aa, Artificial Sequence
  Artifcially synthesized peptide
KIHTLELKL

SEQ ID NO: 823 - protein, 8 aa, Artificial Sequence
  Artifcially synthesized peptide
KIISIFSG

SEQ ID NO: 824 - protein, 11 aa, Artificial Sequence
  Artifcially synthesized peptide
KIISIFSGTEK

SEQ ID NO: 825 - protein, 9 aa, Artificial Sequence
  Artifcially synthesized peptide
KIKSFEVVF

SEQ ID NO: 826 - protein, 9 aa, Artificial Sequence
  Artifcially synthesized peptide
KIKSFVKVY

SEQ ID NO: 827 - protein, 10 aa, Artificial Sequence
  Artifcially synthesized peptide
KIKSLEEIYL

SEQ ID NO: 828 - protein, 9 aa, Artificial Sequence
  Artifcially synthesized peptide
KIMSPRKAL

SEQ ID NO: 829 - protein, 9 aa, Artificial Sequence
  Artifcially synthesized peptide
KIMSSPLSK

SEQ ID NO: 830 - protein, 9 aa, Artificial Sequence
  Artifcially synthesized peptide
KIMSSPLSK

SEQ ID NO: 831 - protein, 9 aa, Artificial Sequence
  Artifcially synthesized peptide
KIMSSPLSK

SEQ ID NO: 832 - protein, 9 aa, Artificial Sequence
  Artifcially synthesized peptide
KIRPHIATL

SEQ ID NO: 833 - protein, 10 aa, Artificial Sequence
  Artifcially synthesized peptide
KIRSSPREAK

SEQ ID NO: 834 - protein, 10 aa, Artificial Sequence
  Artifcially synthesized peptide
KIRSSPREAY

SEQ ID NO: 835 - protein, 9 aa, Artificial Sequence
  Artifcially synthesized peptide
KIRTSPTFR

SEQ ID NO: 836 - protein, 9 aa, Artificial Sequence
  Artifcially synthesized peptide
KIRTSPTFY

SEQ ID NO: 837 - protein, 9 aa, Artificial Sequence
  Artifcially synthesized peptide
KISSLEIKL

SEQ ID NO: 838 - protein, 9 aa, Artificial Sequence
  Artifcially synthesized peptide
KISSLEIKL

SEQ ID NO: 839 - protein, 9 aa, Artificial Sequence
  Artifcially synthesized peptide
KISSLEIKL

SEQ ID NO: 840 - protein, 11 aa, Artificial Sequence
  Artifcially synthesized peptide
KLASLEREASV

SEQ ID NO: 841 - protein, 9 aa, Artificial Sequence
  Artifcially synthesized peptide
KLASLLHQV

SEQ ID NO: 842 - protein, 11 aa, Artificial Sequence
  Artifcially synthesized peptide
KLASPEKLAGL

SEQ ID NO: 843 - protein, 10 aa, Artificial Sequence
  Artifcially synthesized peptide
KLASPELERL

SEQ ID NO: 844 - protein, 10 aa, Artificial Sequence
  Artifcially synthesized peptide
KLASPELERV

SEQ ID NO: 845 - protein, 12 aa, Artificial Sequence
  Artifcially synthesized peptide
KLASPSEVVQQV

SEQ ID NO: 846 - protein, 10 aa, Artificial Sequence
  Artifcially synthesized peptide
KLDIVSSQKV

SEQ ID NO: 847 - protein, 10 aa, Artificial Sequence
  Artifcially synthesized peptide
KLDSFLDMQV

SEQ ID NO: 848 - protein, 9 aa, Artificial Sequence
  Artifcially synthesized peptide
KLDSPRVTV

SEQ ID NO: 849 - protein, 10 aa, Artificial Sequence
  Artifcially synthesized peptide
KLDSPTKVKK

SEQ ID NO: 850 - protein, 10 aa, Artificial Sequence
  Artifcially synthesized peptide
KLDSPTKVKY

SEQ ID NO: 851 - protein, 10 aa, Artificial Sequence
  Artifcially synthesized peptide
KLFHGSLEEL

SEQ ID NO: 852 - protein, 10 aa, Artificial Sequence
  Artifcially synthesized peptide
KLFPDTPLAL

SEQ ID NO: 853 - protein, 10 aa, Artificial Sequence
  Artifcially synthesized peptide
KLFPDTPLAV

SEQ ID NO: 854 - protein, 9 aa, Artificial Sequence
  Artifcially synthesized peptide
KLFSGTVRK

SEQ ID NO: 855 - protein, 10 aa, Artificial Sequence
  Artifcially synthesized peptide
KLFSGVFVKV

SEQ ID NO: 856 - protein, 9 aa, Artificial Sequence
  Artifcially synthesized peptide
KLFSKQQGK

SEQ ID NO: 857 - protein, 9 aa, Artificial Sequence
  Artifcially synthesized peptide
KLFSKQQGY

SEQ ID NO: 858 - protein, 9 aa, Artificial Sequence
  Artifcially synthesized peptide
KLFSPAHKK

SEQ ID NO: 859 - protein, 9 aa, Artificial Sequence
  Artifcially synthesized peptide
KLFSPAHKY

SEQ ID NO: 860 - protein, 11 aa, Artificial Sequence
  Artifcially synthesized peptide
KLFSPSKEAEL

SEQ ID NO: 861 - protein, 11 aa, Artificial Sequence
  Artifcially synthesized peptide
KLFSPSKEAEV

SEQ ID NO: 862 - protein, 11 aa, Artificial Sequence
  Artifcially synthesized peptide
KLHGSLARAGK

SEQ ID NO: 863 - protein, 11 aa, Artificial Sequence
  Artifcially synthesized peptide
KLHGSLARAGY

SEQ ID NO: 864 - protein, 10 aa, Artificial Sequence
  Artifcially synthesized peptide
KLHSLIGLGI

SEQ ID NO: 865 - protein, 11 aa, Artificial Sequence
  Artifcially synthesized peptide
KLIDIVSSQKV

SEQ ID NO: 866 - protein, 9 aa, Artificial Sequence
  Artifcially synthesized peptide
KLIDRTESL

SEQ ID NO: 867 - protein, 10 aa, Artificial Sequence
  Artifcially synthesized peptide
KLIDVSSQKV

SEQ ID NO: 868 - protein, 11 aa, Artificial Sequence
  Artifcially synthesized peptide
KLISSSSLKEK

SEQ ID NO: 869 - protein, 11 aa, Artificial Sequence
  Artifcially synthesized peptide
KLISSSSLKEY

SEQ ID NO: 870 - protein, 9 aa, Artificial Sequence
  Artifcially synthesized peptide
KLKDRLPSI

SEQ ID NO: 871 - protein, 10 aa, Artificial Sequence
  Artifcially synthesized peptide
KLKSNPDFLK

SEQ ID NO: 872 - protein, 11 aa, Artificial Sequence
  Artifcially synthesized peptide
KLKSNPDFLKK

SEQ ID NO: 873 - protein, 11 aa, Artificial Sequence
  Artifcially synthesized peptide
KLKSNPDFLKY

SEQ ID NO: 874 - protein, 9 aa, Artificial Sequence
  Artifcially synthesized peptide
KLKSPAPGL

SEQ ID NO: 875 - protein, 9 aa, Artificial Sequence
  Artifcially synthesized peptide
KLKSPAPGV

SEQ ID NO: 876 - protein, 9 aa, Artificial Sequence
  Artifcially synthesized peptide
KLKSQEIFL

SEQ ID NO: 877 - protein, 11 aa, Artificial Sequence
  Artifcially synthesized peptide
KLKSSPLIEKK

SEQ ID NO: 878 - protein, 11 aa, Artificial Sequence
  Artifcially synthesized peptide
KLKSSPLIEKY

SEQ ID NO: 879 - protein, 9 aa, Artificial Sequence
  Artifcially synthesized peptide
KLKTPLVAK

SEQ ID NO: 880 - protein, 9 aa, Artificial Sequence
  Artifcially synthesized peptide
KLKTPLVAR

SEQ ID NO: 881 - protein, 11 aa, Artificial Sequence
  Artifcially synthesized peptide
KLLDFGSLSNL

SEQ ID NO: 882 - protein, 13 aa, Artificial Sequence
  Artifcially synthesized peptide
KLLDFGSLSNLQV

SEQ ID NO: 883 - protein, 9 aa, Artificial Sequence
  Artifcially synthesized peptide
KLLQFYPSL

SEQ ID NO: 884 - protein, 9 aa, Artificial Sequence
  Artifcially synthesized peptide
KLLQFYPSV

SEQ ID NO: 885 - protein, 10 aa, Artificial Sequence
  Artifcially synthesized peptide
KLLSPSDEKL

SEQ ID NO: 886 - protein, 10 aa, Artificial Sequence
  Artifcially synthesized peptide
KLLSPSNEKV

SEQ ID NO: 887 - protein, 10 aa, Artificial Sequence
  Artifcially synthesized peptide
KLLSSAQRTL

SEQ ID NO: 888 - protein, 10 aa, Artificial Sequence
  Artifcially synthesized peptide
KLLSSAQRTV

SEQ ID NO: 889 - protein, 10 aa, Artificial Sequence
  Artifcially synthesized peptide
KLLSTEEMEL

SEQ ID NO: 890 - protein, 10 aa, Artificial Sequence
  Artifcially synthesized peptide
KLLSTEEMEV

SEQ ID NO: 891 - protein, 9 aa, Artificial Sequence
  Artifcially synthesized peptide
KLLSVERIK

SEQ ID NO: 892 - protein, 9 aa, Artificial Sequence
  Artifcially synthesized peptide
KLLSYIQRL

SEQ ID NO: 893 - protein, 9 aa, Artificial Sequence
  Artifcially synthesized peptide
KLLTPIKEK

SEQ ID NO: 894 - protein, 9 aa, Artificial Sequence
  Artifcially synthesized peptide
KLLTPIKEY

SEQ ID NO: 895 - protein, 9 aa, Artificial Sequence
  Artifcially synthesized peptide
KLMAPDISL

SEQ ID NO: 896 - protein, 9 aa, Artificial Sequence
  Artifcially synthesized peptide
KLMAPDISV

SEQ ID NO: 897 - protein, 10 aa, Artificial Sequence
  Artifcially synthesized peptide
KLMIDRTESV

SEQ ID NO: 898 - protein, 9 aa, Artificial Sequence
  Artifcially synthesized peptide
KLMSDVEDV

SEQ ID NO: 899 - protein, 9 aa, Artificial Sequence
  Artifcially synthesized peptide
KLMSPKADV

SEQ ID NO: 900 - protein, 11 aa, Artificial Sequence
  Artifcially synthesized peptide
KLMSPKADVKL

SEQ ID NO: 901 - protein, 11 aa, Artificial Sequence
  Artifcially synthesized peptide
KLMSPKADVKV

SEQ ID NO: 902 - protein, 9 aa, Artificial Sequence
  Artifcially synthesized peptide
KLPDSPALA

SEQ ID NO: 903 - protein, 10 aa, Artificial Sequence
  Artifcially synthesized peptide
KLPDSPALAK

SEQ ID NO: 904 - protein, 11 aa, Artificial Sequence
  Artifcially synthesized peptide
KLPDSPALAKK

SEQ ID NO: 905 - protein, 11 aa, Artificial Sequence
  Artifcially synthesized peptide
KLPDSPALAKY

SEQ ID NO: 906 - protein, 10 aa, Artificial Sequence
  Artifcially synthesized peptide
KLPDSPALAY

SEQ ID NO: 907 - protein, 9 aa, Artificial Sequence
  Artifcially synthesized peptide
KLPSGSKKV

SEQ ID NO: 908 - protein, 10 aa, Artificial Sequence
  Artifcially synthesized peptide
KLPSPAPARK

SEQ ID NO: 909 - protein, 10 aa, Artificial Sequence
  Artifcially synthesized peptide
KLPTSPLKMK

SEQ ID NO: 910 - protein, 10 aa, Artificial Sequence
  Artifcially synthesized peptide
KLPTSPLKMY

SEQ ID NO: 911 - protein, 10 aa, Artificial Sequence
  Artifcially synthesized peptide
KLPTTPVKAK

SEQ ID NO: 912 - protein, 10 aa, Artificial Sequence
  Artifcially synthesized peptide
KLPTTPVKAY

SEQ ID NO: 913 - protein, 9 aa, Artificial Sequence
  Artifcially synthesized peptide
KLQEFLQTL

SEQ ID NO: 914 - protein, 9 aa, Artificial Sequence
  Artifcially synthesized peptide
KLQVTSLSV

SEQ ID NO: 915 - protein, 9 aa, Artificial Sequence
  Artifcially synthesized peptide
KLRSPFLQK

SEQ ID NO: 916 - protein, 9 aa, Artificial Sequence
  Artifcially synthesized peptide
KLRSPFLQY

SEQ ID NO: 917 - protein, 9 aa, Artificial Sequence
  Artifcially synthesized peptide
KLRSPKSEL

SEQ ID NO: 918 - protein, 10 aa, Artificial Sequence
  Artifcially synthesized peptide
KLRSSPREAK

SEQ ID NO: 919 - protein, 9 aa, Artificial Sequence
  Artifcially synthesized peptide
KLRTSPTFK

SEQ ID NO: 920 - protein, 10 aa, Artificial Sequence
  Artifcially synthesized peptide
KLSGDQPAAR

SEQ ID NO: 921 - protein, 7 aa, Artificial Sequence
  Artifcially synthesized peptide
KLSGLSF

SEQ ID NO: 922 - protein, 9 aa, Artificial Sequence
  Artifcially synthesized peptide
KLSSLGNLK

SEQ ID NO: 923 - protein, 10 aa, Artificial Sequence
  Artifcially synthesized peptide
KLSSLGNLKK

SEQ ID NO: 924 - protein, 10 aa, Artificial Sequence
  Artifcially synthesized peptide
KLSSLGNLKY

SEQ ID NO: 925 - protein, 10 aa, Artificial Sequence
  Artifcially synthesized peptide
KLSSPRGGMK

SEQ ID NO: 926 - protein, 11 aa, Artificial Sequence
  Artifcially synthesized peptide
KLSSPRGGMKK

SEQ ID NO: 927 - protein, 11 aa, Artificial Sequence
  Artifcially synthesized peptide
KLSSPRGGMKY

SEQ ID NO: 928 - protein, 15 aa, Artificial Sequence
  Artifcially synthesized peptide
KLSVIAEDSESGKQN

SEQ ID NO: 929 - protein, 16 aa, Artificial Sequence
  Artifcially synthesized peptide
KLSVIAEDSESGKQNP

SEQ ID NO: 930 - protein, 17 aa, Artificial Sequence
  Artifcially synthesized peptide
KLSVIAEDSESGKQNPG

SEQ ID NO: 931 - protein, 13 aa, Artificial Sequence
  Artifcially synthesized peptide
KLVSFHDDSDEDL

SEQ ID NO: 932 - protein, 12 aa, Artificial Sequence
  Artifcially synthesized peptide
KLWTLVSEQTRV

SEQ ID NO: 933 - protein, 10 aa, Artificial Sequence
  Artifcially synthesized peptide
KLYSEIDIKV

SEQ ID NO: 934 - protein, 9 aa, Artificial Sequence
  Artifcially synthesized peptide
KLYSGNMEK

SEQ ID NO: 935 - protein, 9 aa, Artificial Sequence
  Artifcially synthesized peptide
KLYSISSQV

SEQ ID NO: 936 - protein, 9 aa, Artificial Sequence
  Artifcially synthesized peptide
KLYTYIQSR

SEQ ID NO: 937 - protein, 10 aa, Artificial Sequence
  Artifcially synthesized peptide
KLYTYIQSRF

SEQ ID NO: 938 - protein, 9 aa, Artificial Sequence
  Artifcially synthesized peptide
KMASLARKV

SEQ ID NO: 939 - protein, 9 aa, Artificial Sequence
  Artifcially synthesized peptide
KMASLLHQV

SEQ ID NO: 940 - protein, 10 aa, Artificial Sequence
  Artifcially synthesized peptide
KMASPELERL

SEQ ID NO: 941 - protein, 10 aa, Artificial Sequence
  Artifcially synthesized peptide
KMASPELERV

SEQ ID NO: 942 - protein, 10 aa, Artificial Sequence
  Artifcially synthesized peptide
KMDIVSSQKV

SEQ ID NO: 943 - protein, 10 aa, Artificial Sequence
  Artifcially synthesized peptide
KMDSFLDMQL

SEQ ID NO: 944 - protein, 10 aa, Artificial Sequence
  Artifcially synthesized peptide
KMDSFLDMQV

SEQ ID NO: 945 - protein, 9 aa, Artificial Sequence
  Artifcially synthesized peptide
KMDSPRVTV

SEQ ID NO: 946 - protein, 10 aa, Artificial Sequence
  Artifcially synthesized peptide
KMDSPTKVKK

SEQ ID NO: 947 - protein, 10 aa, Artificial Sequence
  Artifcially synthesized peptide
KMFPDTPLAL

SEQ ID NO: 948 - protein, 10 aa, Artificial Sequence
  Artifcially synthesized peptide
KMFPDTPLAV

SEQ ID NO: 949 - protein, 9 aa, Artificial Sequence
  Artifcially synthesized peptide
KMFSGTVRK

SEQ ID NO: 950 - protein, 10 aa, Artificial Sequence
  Artifcially synthesized peptide
KMFSGVFVKV

SEQ ID NO: 951 - protein, 9 aa, Artificial Sequence
  Artifcially synthesized peptide
KMFSKQQGK

SEQ ID NO: 952 - protein, 9 aa, Artificial Sequence
  Artifcially synthesized peptide
KMFSPAHKK

SEQ ID NO: 953 - protein, 11 aa, Artificial Sequence
  Artifcially synthesized peptide
KMFSPSKEAEL

SEQ ID NO: 954 - protein, 11 aa, Artificial Sequence
  Artifcially synthesized peptide
KMFSPSKEAEV

SEQ ID NO: 955 - protein, 11 aa, Artificial Sequence
  Artifcially synthesized peptide
KMHGSLARAGK

SEQ ID NO: 956 - protein, 11 aa, Artificial Sequence
  Artifcially synthesized peptide
KMIDIVSSQKV

SEQ ID NO: 957 - protein, 9 aa, Artificial Sequence
  Artifcially synthesized peptide
KMIDRTESL

SEQ ID NO: 958 - protein, 11 aa, Artificial Sequence
  Artifcially synthesized peptide
KMISSSSLKEK

SEQ ID NO: 959 - protein, 10 aa, Artificial Sequence
  Artifcially synthesized peptide
KMKSNPDFLK

SEQ ID NO: 960 - protein, 11 aa, Artificial Sequence
  Artifcially synthesized peptide
KMKSNPDFLKK

SEQ ID NO: 961 - protein, 11 aa, Artificial Sequence
  Artifcially synthesized peptide
KMKSNPDFLKY

SEQ ID NO: 962 - protein, 11 aa, Artificial Sequence
  Artifcially synthesized peptide
KMKSSPLIEKK

SEQ ID NO: 963 - protein, 9 aa, Artificial Sequence
  Artifcially synthesized peptide
KMKTPLVAK

SEQ ID NO: 964 - protein, 9 aa, Artificial Sequence
  Artifcially synthesized peptide
KMKTPLVAR

SEQ ID NO: 965 - protein, 13 aa, Artificial Sequence
  Artifcially synthesized peptide
KMLDFGSLSNLQV

SEQ ID NO: 966 - protein, 9 aa, Artificial Sequence
  Artifcially synthesized peptide
KMLQFYPSL

SEQ ID NO: 967 - protein, 11 aa, Artificial Sequence
  Artifcially synthesized peptide
KMLSCAGADRL

SEQ ID NO: 968 - protein, 11 aa, Artificial Sequence
  Artifcially synthesized peptide
KMLSCAGADRL

SEQ ID NO: 969 - protein, 10 aa, Artificial Sequence
  Artifcially synthesized peptide
KMLSPSNEKL

SEQ ID NO: 970 - protein, 10 aa, Artificial Sequence
  Artifcially synthesized peptide
KMLSPSNEKV

SEQ ID NO: 971 - protein, 10 aa, Artificial Sequence
  Artifcially synthesized peptide
KMLSSAQRTL

SEQ ID NO: 972 - protein, 10 aa, Artificial Sequence
  Artifcially synthesized peptide
KMLSSAQRTV

SEQ ID NO: 973 - protein, 9 aa, Artificial Sequence
  Artifcially synthesized peptide
KMLSVERIK

SEQ ID NO: 974 - protein, 9 aa, Artificial Sequence
  Artifcially synthesized peptide
KMLTPIKEK

SEQ ID NO: 975 - protein, 9 aa, Artificial Sequence
  Artifcially synthesized peptide
KMLTPRIEL

SEQ ID NO: 976 - protein, 9 aa, Artificial Sequence
  Artifcially synthesized peptide
KMMAPDISV

SEQ ID NO: 977 - protein, 11 aa, Artificial Sequence
  Artifcially synthesized peptide
KMMSPKADVKL

SEQ ID NO: 978 - protein, 11 aa, Artificial Sequence
  Artifcially synthesized peptide
KMMSPKADVKV

SEQ ID NO: 979 - protein, 10 aa, Artificial Sequence
  Artifcially synthesized peptide
KMPTSPLKMK

SEQ ID NO: 980 - protein, 10 aa, Artificial Sequence
  Artifcially synthesized peptide
KMPTTPVKAK

SEQ ID NO: 981 - protein, 10 aa, Artificial Sequence
  Artifcially synthesized peptide
KMPTTPVKAY

SEQ ID NO: 982 - protein, 9 aa, Artificial Sequence
  Artifcially synthesized peptide
KMRSPFLQK

SEQ ID NO: 983 - protein, 10 aa, Artificial Sequence
  Artifcially synthesized peptide
KMRSSPREAK

SEQ ID NO: 984 - protein, 9 aa, Artificial Sequence
  Artifcially synthesized peptide
KMRTSPTFK

SEQ ID NO: 985 - protein, 9 aa, Artificial Sequence
  Artifcially synthesized peptide
KMSSLGNLK

SEQ ID NO: 986 - protein, 10 aa, Artificial Sequence
  Artifcially synthesized peptide
KMSSLGNLKK

SEQ ID NO: 987 - protein, 10 aa, Artificial Sequence
  Artifcially synthesized peptide
KMSSLGNLKY

SEQ ID NO: 988 - protein, 10 aa, Artificial Sequence
  Artifcially synthesized peptide
KMSSPRGGMK

SEQ ID NO: 989 - protein, 11 aa, Artificial Sequence
  Artifcially synthesized peptide
KMSSPRGGMKK

SEQ ID NO: 990 - protein, 9 aa, Artificial Sequence
  Artifcially synthesized peptide
KMSSYAFFV

SEQ ID NO: 991 - protein, 9 aa, Artificial Sequence
  Artifcially synthesized peptide
KMSSYAFFV

SEQ ID NO: 992 - protein, 9 aa, Artificial Sequence
  Artifcially synthesized peptide
KMSSYAFFV

SEQ ID NO: 993 - protein, 10 aa, Artificial Sequence
  Artifcially synthesized peptide
KMVSMKPPGF

SEQ ID NO: 994 - protein, 10 aa, Artificial Sequence
  Artifcially synthesized peptide
KMYSEIDIKV

SEQ ID NO: 995 - protein, 9 aa, Artificial Sequence
  Artifcially synthesized peptide
KMYSGNMEK

SEQ ID NO: 996 - protein, 8 aa, Artificial Sequence
  Artifcially synthesized peptide
KNRSWKYN

SEQ ID NO: 997 - protein, 9 aa, Artificial Sequence
  Artifcially synthesized peptide
KNRSWKYNQ

SEQ ID NO: 998 - protein, 14 aa, Artificial Sequence
  Artifcially synthesized peptide
KNRSWKYNQSISLR

SEQ ID NO: 999 - protein, 16 aa, Artificial Sequence
  Artifcially synthesized peptide
KNRSWKYNQSISLRRP

SEQ ID NO: 1000 - protein, 9 aa, Artificial Sequence
  Artifcially synthesized peptide
KPASPARRF

SEQ ID NO: 1001 - protein, 9 aa, Artificial Sequence
  Artifcially synthesized peptide
KPASPARRL

SEQ ID NO: 1002 - protein, 11 aa, Artificial Sequence
  Artifcially synthesized peptide
KPASPARRLDL

SEQ ID NO: 1003 - protein, 9 aa, Artificial Sequence
  Artifcially synthesized peptide
KPASPARRM

SEQ ID NO: 1004 - protein, 9 aa, Artificial Sequence
  Artifcially synthesized peptide
KPASPARRV

SEQ ID NO: 1005 - protein, 11 aa, Artificial Sequence
  Artifcially synthesized peptide
KPASPKFIVTF

SEQ ID NO: 1006 - protein, 11 aa, Artificial Sequence
  Artifcially synthesized peptide
KPASPKFIVTL

SEQ ID NO: 1007 - protein, 11 aa, Artificial Sequence
  Artifcially synthesized peptide
KPASPKFIVTM

SEQ ID NO: 1008 - protein, 11 aa, Artificial Sequence
  Artifcially synthesized peptide
KPASPKFIVTV

SEQ ID NO: 1009 - protein, 12 aa, Artificial Sequence
  Artifcially synthesized peptide
KPAVSRSRSSSL

SEQ ID NO: 1010 - protein, 10 aa, Artificial Sequence
  Artifcially synthesized peptide
KPESRRSSLL

SEQ ID NO: 1011 - protein, 10 aa, Artificial Sequence
  Artifcially synthesized peptide
KPFKLSGLSF

SEQ ID NO: 1012 - protein, 9 aa, Artificial Sequence
  Artifcially synthesized peptide
KPGLGEGTP

SEQ ID NO: 1013 - protein, 9 aa, Artificial Sequence
  Artifcially synthesized peptide
KPLIRSQSL

SEQ ID NO: 1014 - protein, 10 aa, Artificial Sequence
  Artifcially synthesized peptide
KPMTPKVVTL

SEQ ID NO: 1015 - protein, 11 aa, Artificial Sequence
  Artifcially synthesized peptide
KPPGTPPPSAL

SEQ ID NO: 1016 - protein, 9 aa, Artificial Sequence
  Artifcially synthesized peptide
KPPHSPLVF

SEQ ID NO: 1017 - protein, 9 aa, Artificial Sequence
  Artifcially synthesized peptide
KPPHSPLVL

SEQ ID NO: 1018 - protein, 9 aa, Artificial Sequence
  Artifcially synthesized peptide
KPPHSPLVM

SEQ ID NO: 1019 - protein, 9 aa, Artificial Sequence
  Artifcially synthesized peptide
KPPHSPLVV

SEQ ID NO: 1020 - protein, 10 aa, Artificial Sequence
  Artifcially synthesized peptide
KPPSPEHQSF

SEQ ID NO: 1021 - protein, 10 aa, Artificial Sequence
  Artifcially synthesized peptide
KPPSPEHQSL

SEQ ID NO: 1022 - protein, 10 aa, Artificial Sequence
  Artifcially synthesized peptide
KPPSPEHQSM

SEQ ID NO: 1023 - protein, 10 aa, Artificial Sequence
  Artifcially synthesized peptide
KPPSPEHQSV

SEQ ID NO: 1024 - protein, 9 aa, Artificial Sequence
  Artifcially synthesized peptide
KPPSPGTVL

SEQ ID NO: 1025 - protein, 11 aa, Artificial Sequence
  Artifcially synthesized peptide
KPPSPGTVLAL

SEQ ID NO: 1026 - protein, 10 aa, Artificial Sequence
  Artifcially synthesized peptide
KPPSPSPIEF

SEQ ID NO: 1027 - protein, 10 aa, Artificial Sequence
  Artifcially synthesized peptide
KPPSPSPIEM

SEQ ID NO: 1028 - protein, 10 aa, Artificial Sequence
  Artifcially synthesized peptide
KPPSPSPIEV

SEQ ID NO: 1029 - protein, 9 aa, Artificial Sequence
  Artifcially synthesized peptide
KPPTPGASF

SEQ ID NO: 1030 - protein, 9 aa, Artificial Sequence
  Artifcially synthesized peptide
KPPTPGASL

SEQ ID NO: 1031 - protein, 9 aa, Artificial Sequence
  Artifcially synthesized peptide
KPPTPGASM

SEQ ID NO: 1032 - protein, 9 aa, Artificial Sequence
  Artifcially synthesized peptide
KPPTPGASV

SEQ ID NO: 1033 - protein, 10 aa, Artificial Sequence
  Artifcially synthesized peptide
KPPTSQSSVL

SEQ ID NO: 1034 - protein, 9 aa, Artificial Sequence
  Artifcially synthesized peptide
KPPVSFFSL

SEQ ID NO: 1035 - protein, 9 aa, Artificial Sequence
  Artifcially synthesized peptide
KPPYRSHSF

SEQ ID NO: 1036 - protein, 9 aa, Artificial Sequence
  Artifcially synthesized peptide
KPPYRSHSL

SEQ ID NO: 1037 - protein, 9 aa, Artificial Sequence
  Artifcially synthesized peptide
KPPYRSHSM

SEQ ID NO: 1038 - protein, 9 aa, Artificial Sequence
  Artifcially synthesized peptide
KPPYRSHSV

SEQ ID NO: 1039 - protein, 9 aa, Artificial Sequence
  Artifcially synthesized peptide
KPQTRGKTF

SEQ ID NO: 1040 - protein, 9 aa, Artificial Sequence
  Artifcially synthesized peptide
KPQTRGKTL

SEQ ID NO: 1041 - protein, 9 aa, Artificial Sequence
  Artifcially synthesized peptide
KPQTRGKTM

SEQ ID NO: 1042 - protein, 9 aa, Artificial Sequence
  Artifcially synthesized peptide
KPQTRGKTV

SEQ ID NO: 1043 - protein, 9 aa, Artificial Sequence
  Artifcially synthesized peptide
KPRPLSMDL

SEQ ID NO: 1044 - protein, 9 aa, Artificial Sequence
  Artifcially synthesized peptide
KPRPPPLSF

SEQ ID NO: 1045 - protein, 9 aa, Artificial Sequence
  Artifcially synthesized peptide
KPRPPPLSL

SEQ ID NO: 1046 - protein, 9 aa, Artificial Sequence
  Artifcially synthesized peptide
KPRPPPLSM

SEQ ID NO: 1047 - protein, 9 aa, Artificial Sequence
  Artifcially synthesized peptide
KPRPPPLSP

SEQ ID NO: 1048 - protein, 9 aa, Artificial Sequence
  Artifcially synthesized peptide
KPRPPPLSV

SEQ ID NO: 1049 - protein, 9 aa, Artificial Sequence
  Artifcially synthesized peptide
KPRRFSRSL

SEQ ID NO: 1050 - protein, 9 aa, Artificial Sequence
  Artifcially synthesized peptide
KPRSPDHVF

SEQ ID NO: 1051 - protein, 9 aa, Artificial Sequence
  Artifcially synthesized peptide
KPRSPDHVL

SEQ ID NO: 1052 - protein, 9 aa, Artificial Sequence
  Artifcially synthesized peptide
KPRSPDHVM

SEQ ID NO: 1053 - protein, 9 aa, Artificial Sequence
  Artifcially synthesized peptide
KPRSPDHVV

SEQ ID NO: 1054 - protein, 9 aa, Artificial Sequence
  Artifcially synthesized peptide
KPRSPFSKI

SEQ ID NO: 1055 - protein, 9 aa, Artificial Sequence
  Artifcially synthesized peptide
KPRSPPRAF

SEQ ID NO: 1056 - protein, 9 aa, Artificial Sequence
  Artifcially synthesized peptide
KPRSPPRAL

SEQ ID NO: 1057 - protein, 10 aa, Artificial Sequence
  Artifcially synthesized peptide
KPRSPPRALF

SEQ ID NO: 1058 - protein, 10 aa, Artificial Sequence
  Artifcially synthesized peptide
KPRSPPRALL

SEQ ID NO: 1059 - protein, 10 aa, Artificial Sequence
  Artifcially synthesized peptide
KPRSPPRALM

SEQ ID NO: 1060 - protein, 10 aa, Artificial Sequence
  Artifcially synthesized peptide
KPRSPPRALV

SEQ ID NO: 1061 - protein, 11 aa, Artificial Sequence
  Artifcially synthesized peptide
KPRSPPRALVF

SEQ ID NO: 1062 - protein, 11 aa, Artificial Sequence
  Artifcially synthesized peptide
KPRSPPRALVL

SEQ ID NO: 1063 - protein, 12 aa, Artificial Sequence
  Artifcially synthesized peptide
KPRSPPRALVLF

SEQ ID NO: 1064 - protein, 12 aa, Artificial Sequence
  Artifcially synthesized peptide
KPRSPPRALVLL

SEQ ID NO: 1065 - protein, 12 aa, Artificial Sequence
  Artifcially synthesized peptide
KPRSPPRALVLM

SEQ ID NO: 1066 - protein, 12 aa, Artificial Sequence
  Artifcially synthesized peptide
KPRSPPRALVLP

SEQ ID NO: 1067 - protein, 12 aa, Artificial Sequence
  Artifcially synthesized peptide
KPRSPPRALVLV

SEQ ID NO: 1068 - protein, 11 aa, Artificial Sequence
  Artifcially synthesized peptide
KPRSPPRALVM

SEQ ID NO: 1069 - protein, 11 aa, Artificial Sequence
  Artifcially synthesized peptide
KPRSPPRALVV

SEQ ID NO: 1070 - protein, 9 aa, Artificial Sequence
  Artifcially synthesized peptide
KPRSPPRAM

SEQ ID NO: 1071 - protein, 9 aa, Artificial Sequence
  Artifcially synthesized peptide
KPRSPPRAV

SEQ ID NO: 1072 - protein, 9 aa, Artificial Sequence
  Artifcially synthesized peptide
KPRSPVVEF

SEQ ID NO: 1073 - protein, 9 aa, Artificial Sequence
  Artifcially synthesized peptide
KPRSPVVEL

SEQ ID NO: 1074 - protein, 9 aa, Artificial Sequence
  Artifcially synthesized peptide
KPRSPVVEM

SEQ ID NO: 1075 - protein, 9 aa, Artificial Sequence
  Artifcially synthesized peptide
KPRSPVVEV

SEQ ID NO: 1076 - protein, 10 aa, Artificial Sequence
  Artifcially synthesized peptide
KPSSLRRVTI

SEQ ID NO: 1077 - protein, 9 aa, Artificial Sequence
  Artifcially synthesized peptide
KPSSPRGSL

SEQ ID NO: 1078 - protein, 10 aa, Artificial Sequence
  Artifcially synthesized peptide
KPSSPRGSLL

SEQ ID NO: 1079 - protein, 9 aa, Artificial Sequence
  Artifcially synthesized peptide
KPTLYNVSL

SEQ ID NO: 1080 - protein, 10 aa, Artificial Sequence
  Artifcially synthesized peptide
KPVSPKSGTL

SEQ ID NO: 1081 - protein, 8 aa, Artificial Sequence
  Artifcially synthesized peptide
KPVSPLLL

SEQ ID NO: 1082 - protein, 9 aa, Artificial Sequence
  Artifcially synthesized peptide
KPYSPLASF

SEQ ID NO: 1083 - protein, 9 aa, Artificial Sequence
  Artifcially synthesized peptide
KPYSPLASL

SEQ ID NO: 1084 - protein, 9 aa, Artificial Sequence
  Artifcially synthesized peptide
KPYSPLASM

SEQ ID NO: 1085 - protein, 9 aa, Artificial Sequence
  Artifcially synthesized peptide
KPYSPLASV

SEQ ID NO: 1086 - protein, 9 aa, Artificial Sequence
  Artifcially synthesized peptide
KQDSLVINL

SEQ ID NO: 1087 - protein, 10 aa, Artificial Sequence
  Artifcially synthesized peptide
KQKSLTNLSF

SEQ ID NO: 1088 - protein, 10 aa, Artificial Sequence
  Artifcially synthesized peptide
KQPSFSAKKM

SEQ ID NO: 1089 - protein, 8 aa, Artificial Sequence
  Artifcially synthesized peptide
KQYSGKFF

SEQ ID NO: 1090 - protein, 9 aa, Artificial Sequence
  Artifcially synthesized peptide
KRASALLNL

SEQ ID NO: 1091 - protein, 9 aa, Artificial Sequence
  Artifcially synthesized peptide
KRASFAKSF

SEQ ID NO: 1092 - protein, 9 aa, Artificial Sequence
  Artifcially synthesized peptide
KRASFAKSK

SEQ ID NO: 1093 - protein, 9 aa, Artificial Sequence
  Artifcially synthesized peptide
KRASFAKSL

SEQ ID NO: 1094 - protein, 9 aa, Artificial Sequence
  Artifcially synthesized peptide
KRASFAKSM

SEQ ID NO: 1095 - protein, 9 aa, Artificial Sequence
  Artifcially synthesized peptide
KRASFAKSR

SEQ ID NO: 1096 - protein, 9 aa, Artificial Sequence
  Artifcially synthesized peptide
KRASFAKSV

SEQ ID NO: 1097 - protein, 9 aa, Artificial Sequence
  Artifcially synthesized peptide
KRASFAKSY

SEQ ID NO: 1098 - protein, 10 aa, Artificial Sequence
  Artifcially synthesized peptide
KRASGQAFEF

SEQ ID NO: 1099 - protein, 10 aa, Artificial Sequence
  Artifcially synthesized peptide
KRASGQAFEK

SEQ ID NO: 1100 - protein, 10 aa, Artificial Sequence
  Artifcially synthesized peptide
KRASGQAFEL

SEQ ID NO: 1101 - protein, 10 aa, Artificial Sequence
  Artifcially synthesized peptide
KRASGQAFER

SEQ ID NO: 1102 - protein, 10 aa, Artificial Sequence
  Artifcially synthesized peptide
KRASGQAFEY

SEQ ID NO: 1103 - protein, 9 aa, Artificial Sequence
  Artifcially synthesized peptide
KRASRIYNT

SEQ ID NO: 1104 - protein, 9 aa, Artificial Sequence
  Artifcially synthesized peptide
KRASSPFRF

SEQ ID NO: 1105 - protein, 9 aa, Artificial Sequence
  Artifcially synthesized peptide
KRASSPFRK

SEQ ID NO: 1106 - protein, 9 aa, Artificial Sequence
  Artifcially synthesized peptide
KRASSPFRL

SEQ ID NO: 1107 - protein, 9 aa, Artificial Sequence
  Artifcially synthesized peptide
KRASSPFRM

SEQ ID NO: 1108 - protein, 9 aa, Artificial Sequence
  Artifcially synthesized peptide
KRASSPFRR

SEQ ID NO: 1109 - protein, 9 aa, Artificial Sequence
  Artifcially synthesized peptide
KRASSPFRY

SEQ ID NO: 1110 - protein, 9 aa, Artificial Sequence
  Artifcially synthesized peptide
KRASVFVKF

SEQ ID NO: 1111 - protein, 9 aa, Artificial Sequence
  Artifcially synthesized peptide
KRASVFVKK

SEQ ID NO: 1112 - protein, 9 aa, Artificial Sequence
  Artifcially synthesized peptide
KRASVFVKL

SEQ ID NO: 1113 - protein, 9 aa, Artificial Sequence
  Artifcially synthesized peptide
KRASVFVKM

SEQ ID NO: 1114 - protein, 9 aa, Artificial Sequence
  Artifcially synthesized peptide
KRASVFVKR

SEQ ID NO: 1115 - protein, 9 aa, Artificial Sequence
  Artifcially synthesized peptide
KRASVFVKY

SEQ ID NO: 1116 - protein, 9 aa, Artificial Sequence
  Artifcially synthesized peptide
KRASYILRL

SEQ ID NO: 1117 - protein, 7 aa, Artificial Sequence
  Artifcially synthesized peptide
KRFSFKF

SEQ ID NO: 1118 - protein, 7 aa, Artificial Sequence
  Artifcially synthesized peptide
KRFSFKK

SEQ ID NO: 1119 - protein, 9 aa, Artificial Sequence
  Artifcially synthesized peptide
KRFSFKKSF

SEQ ID NO: 1120 - protein, 11 aa, Artificial Sequence
  Artifcially synthesized peptide
KRFSFKKSFKL

SEQ ID NO: 1121 - protein, 9 aa, Artificial Sequence
  Artifcially synthesized peptide
KRFSFKKSK

SEQ ID NO: 1122 - protein, 9 aa, Artificial Sequence
  Artifcially synthesized peptide
KRFSFKKSL

SEQ ID NO: 1123 - protein, 9 aa, Artificial Sequence
  Artifcially synthesized peptide
KRFSFKKSM

SEQ ID NO: 1124 - protein, 9 aa, Artificial Sequence
  Artifcially synthesized peptide
KRFSFKKSR

SEQ ID NO: 1125 - protein, 9 aa, Artificial Sequence
  Artifcially synthesized peptide
KRFSFKKSY

SEQ ID NO: 1126 - protein, 7 aa, Artificial Sequence
  Artifcially synthesized peptide
KRFSFKL

SEQ ID NO: 1127 - protein, 7 aa, Artificial Sequence
  Artifcially synthesized peptide
KRFSFKM

SEQ ID NO: 1128 - protein, 7 aa, Artificial Sequence
  Artifcially synthesized peptide
KRFSFKR

SEQ ID NO: 1129 - protein, 7 aa, Artificial Sequence
  Artifcially synthesized peptide
KRFSFKY

SEQ ID NO: 1130 - protein, 9 aa, Artificial Sequence
  Artifcially synthesized peptide
KRFSGTVRF

SEQ ID NO: 1131 - protein, 9 aa, Artificial Sequence
  Artifcially synthesized peptide
KRFSGTVRK

SEQ ID NO: 1132 - protein, 9 aa, Artificial Sequence
  Artifcially synthesized peptide
KRFSGTVRL

SEQ ID NO: 1133 - protein, 9 aa, Artificial Sequence
  Artifcially synthesized peptide
KRFSGTVRM

SEQ ID NO: 1134 - protein, 9 aa, Artificial Sequence
  Artifcially synthesized peptide
KRFSGTVRR

SEQ ID NO: 1135 - protein, 9 aa, Artificial Sequence
  Artifcially synthesized peptide
KRFSGTVRY

SEQ ID NO: 1136 - protein, 9 aa, Artificial Sequence
  Artifcially synthesized peptide
KRFSLDFNL

SEQ ID NO: 1137 - protein, 9 aa, Artificial Sequence
  Artifcially synthesized peptide
KRISIFLSM

SEQ ID NO: 1138 - protein, 12 aa, Artificial Sequence
  Artifcially synthesized peptide
KRISISTSGGSF

SEQ ID NO: 1139 - protein, 9 aa, Artificial Sequence
  Artifcially synthesized peptide
KRISRMRLV

SEQ ID NO: 1140 - protein, 9 aa, Artificial Sequence
  Artifcially synthesized peptide
KRKSFTSLY

SEQ ID NO: 1141 - protein, 9 aa, Artificial Sequence
  Artifcially synthesized peptide
KRLEKSPSF

SEQ ID NO: 1142 - protein, 9 aa, Artificial Sequence
  Artifcially synthesized peptide
KRLEKSPSF

SEQ ID NO: 1143 - protein, 9 aa, Artificial Sequence
  Artifcially synthesized peptide
KRLSPAPQF

SEQ ID NO: 1144 - protein, 9 aa, Artificial Sequence
  Artifcially synthesized peptide
KRLSPAPQK

SEQ ID NO: 1145 - protein, 9 aa, Artificial Sequence
  Artifcially synthesized peptide
KRLSPAPQL

SEQ ID NO: 1146 - protein, 9 aa, Artificial Sequence
  Artifcially synthesized peptide
KRLSPAPQM

SEQ ID NO: 1147 - protein, 9 aa, Artificial Sequence
  Artifcially synthesized peptide
KRLSPAPQR

SEQ ID NO: 1148 - protein, 9 aa, Artificial Sequence
  Artifcially synthesized peptide
KRLSPAPQY

SEQ ID NO: 1149 - protein, 10 aa, Artificial Sequence
  Artifcially synthesized peptide
KRLSTSPVRL

SEQ ID NO: 1150 - protein, 11 aa, Artificial Sequence
  Artifcially synthesized peptide
KRLSVELTSSL

SEQ ID NO: 1151 - protein, 12 aa, Artificial Sequence
  Artifcially synthesized peptide
KRLSVELTSSLF

SEQ ID NO: 1152 - protein, 9 aa, Artificial Sequence
  Artifcially synthesized peptide
KRLSVERIF

SEQ ID NO: 1153 - protein, 9 aa, Artificial Sequence
  Artifcially synthesized peptide
KRLSVERIK

SEQ ID NO: 1154 - protein, 9 aa, Artificial Sequence
  Artifcially synthesized peptide
KRLSVERIL

SEQ ID NO: 1155 - protein, 9 aa, Artificial Sequence
  Artifcially synthesized peptide
KRLSVERIM

SEQ ID NO: 1156 - protein, 9 aa, Artificial Sequence
  Artifcially synthesized peptide
KRLSVERIR

SEQ ID NO: 1157 - protein, 9 aa, Artificial Sequence
  Artifcially synthesized peptide
KRLSVERIY

SEQ ID NO: 1158 - protein, 11 aa, Artificial Sequence
  Artifcially synthesized peptide
KRLSVERIYQK

SEQ ID NO: 1159 - protein, 9 aa, Artificial Sequence
  Artifcially synthesized peptide
KRLTHVYDL

SEQ ID NO: 1160 - protein, 10 aa, Artificial Sequence
  Artifcially synthesized peptide
KRMSNELENY

SEQ ID NO: 1161 - protein, 8 aa, Artificial Sequence
  Artifcially synthesized peptide
KRMSPKEF

SEQ ID NO: 1162 - protein, 8 aa, Artificial Sequence
  Artifcially synthesized peptide
KRMSPKEK

SEQ ID NO: 1163 - protein, 8 aa, Artificial Sequence
  Artifcially synthesized peptide
KRMSPKEL

SEQ ID NO: 1164 - protein, 8 aa, Artificial Sequence
  Artifcially synthesized peptide
KRMSPKER

SEQ ID NO: 1165 - protein, 8 aa, Artificial Sequence
  Artifcially synthesized peptide
KRMSPKEY

SEQ ID NO: 1166 - protein, 9 aa, Artificial Sequence
  Artifcially synthesized peptide
KRMSPKPEL

SEQ ID NO: 1167 - protein, 8 aa, Artificial Sequence
  Artifcially synthesized peptide
KRMSPKPF

SEQ ID NO: 1168 - protein, 8 aa, Artificial Sequence
  Artifcially synthesized peptide
KRMSPKPK

SEQ ID NO: 1169 - protein, 8 aa, Artificial Sequence
  Artifcially synthesized peptide
KRMSPKPL

SEQ ID NO: 1170 - protein, 8 aa, Artificial Sequence
  Artifcially synthesized peptide
KRMSPKPM

SEQ ID NO: 1171 - protein, 8 aa, Artificial Sequence
  Artifcially synthesized peptide
KRMSPKPR

SEQ ID NO: 1172 - protein, 8 aa, Artificial Sequence
  Artifcially synthesized peptide
KRMSPKPR

SEQ ID NO: 1173 - protein, 8 aa, Artificial Sequence
  Artifcially synthesized peptide
KRMSPKPY

SEQ ID NO: 1174 - protein, 12 aa, Artificial Sequence
  Artifcially synthesized peptide
KRMSVTEGGIKY

SEQ ID NO: 1175 - protein, 9 aa, Artificial Sequence
  Artifcially synthesized peptide
KRNSIKKIV

SEQ ID NO: 1176 - protein, 9 aa, Artificial Sequence
  Artifcially synthesized peptide
KRNSRLGFL

SEQ ID NO: 1177 - protein, 10 aa, Artificial Sequence
  Artifcially synthesized peptide
KRNTFVGTPF

SEQ ID NO: 1178 - protein, 9 aa, Artificial Sequence
  Artifcially synthesized peptide
KRRTGALVL

SEQ ID NO: 1179 - protein, 7 aa, Artificial Sequence
  Artifcially synthesized peptide
KRSPIFF

SEQ ID NO: 1180 - protein, 9 aa, Artificial Sequence
  Artifcially synthesized peptide
KRSSISQLL

SEQ ID NO: 1181 - protein, 10 aa, Artificial Sequence
  Artifcially synthesized peptide
KRSSVHGVSF

SEQ ID NO: 1182 - protein, 9 aa, Artificial Sequence
  Artifcially synthesized peptide
KRTSKYFSL

SEQ ID NO: 1183 - protein, 9 aa, Artificial Sequence
  Artifcially synthesized peptide
KRWQSPVTK

SEQ ID NO: 1184 - protein, 9 aa, Artificial Sequence
  Artifcially synthesized peptide
KRYSEPVSL

SEQ ID NO: 1185 - protein, 9 aa, Artificial Sequence
  Artifcially synthesized peptide
KRYSGNMEF

SEQ ID NO: 1186 - protein, 9 aa, Artificial Sequence
  Artifcially synthesized peptide
KRYSGNMEK

SEQ ID NO: 1187 - protein, 9 aa, Artificial Sequence
  Artifcially synthesized peptide
KRYSGNMEL

SEQ ID NO: 1188 - protein, 9 aa, Artificial Sequence
  Artifcially synthesized peptide
KRYSGNMEM

SEQ ID NO: 1189 - protein, 9 aa, Artificial Sequence
  Artifcially synthesized peptide
KRYSGNMER

SEQ ID NO: 1190 - protein, 9 aa, Artificial Sequence
  Artifcially synthesized peptide
KRYSGNMEY

SEQ ID NO: 1191 - protein, 9 aa, Artificial Sequence
  Artifcially synthesized peptide
KRYSRALYL

SEQ ID NO: 1192 - protein, 9 aa, Artificial Sequence
  Artifcially synthesized peptide
KRYSRSLTI

SEQ ID NO: 1193 - protein, 9 aa, Artificial Sequence
  Artifcially synthesized peptide
KSDGSFIGY

SEQ ID NO: 1194 - protein, 9 aa, Artificial Sequence
  Artifcially synthesized peptide
KSDSPAIQL

SEQ ID NO: 1195 - protein, 10 aa, Artificial Sequence
  Artifcially synthesized peptide
KSDSPSTSSI

SEQ ID NO: 1196 - protein, 9 aa, Artificial Sequence
  Artifcially synthesized peptide
KSDSRQERY

SEQ ID NO: 1197 - protein, 9 aa, Artificial Sequence
  Artifcially synthesized peptide
KSGELLATW

SEQ ID NO: 1198 - protein, 9 aa, Artificial Sequence
  Artifcially synthesized peptide
KSKSMDLGI

SEQ ID NO: 1199 - protein, 11 aa, Artificial Sequence
  Artifcially synthesized peptide
KSKSNPDFLKK

SEQ ID NO: 1200 - protein, 9 aa, Artificial Sequence
  Artifcially synthesized peptide
KSKTPLVAK

SEQ ID NO: 1201 - protein, 9 aa, Artificial Sequence
  Artifcially synthesized peptide
KSKTPLVAR

SEQ ID NO: 1202 - protein, 9 aa, Artificial Sequence
  Artifcially synthesized peptide
KSKTPLVAY

SEQ ID NO: 1203 - protein, 10 aa, Artificial Sequence
  Artifcially synthesized peptide
KSLSPSGLKI

SEQ ID NO: 1204 - protein, 10 aa, Artificial Sequence
  Artifcially synthesized peptide
KSLSPSLLGY

SEQ ID NO: 1205 - protein, 9 aa, Artificial Sequence
  Artifcially synthesized peptide
KSLVRLLLL

SEQ ID NO: 1206 - protein, 9 aa, Artificial Sequence
  Artifcially synthesized peptide
KSPTSPLNM

SEQ ID NO: 1207 - protein, 8 aa, Artificial Sequence
  Artifcially synthesized peptide
KSSIIIRM

SEQ ID NO: 1208 - protein, 9 aa, Artificial Sequence
  Artifcially synthesized peptide
KSSSLDKQL

SEQ ID NO: 1209 - protein, 10 aa, Artificial Sequence
  Artifcially synthesized peptide
KSSSLGNLKK

SEQ ID NO: 1210 - protein, 14 aa, Artificial Sequence
  Artifcially synthesized peptide
KSVKALSSLHGDDQ

SEQ ID NO: 1211 - protein, 15 aa, Artificial Sequence
  Artifcially synthesized peptide
KSVKALSSLHGDDQD

SEQ ID NO: 1212 - protein, 19 aa, Artificial Sequence
  Artifcially synthesized peptide
KSVKALSSLHGDDQDSEDE

SEQ ID NO: 1213 - protein, 11 aa, Artificial Sequence
  Artifcially synthesized peptide
KSYSFIARMKA

SEQ ID NO: 1214 - protein, 9 aa, Artificial Sequence
  Artifcially synthesized peptide
KSYSRSRSR

SEQ ID NO: 1215 - protein, 9 aa, Artificial Sequence
  Artifcially synthesized peptide
KTDGSFIGY

SEQ ID NO: 1216 - protein, 9 aa, Artificial Sequence
  Artifcially synthesized peptide
KTDSRQERY

SEQ ID NO: 1217 - protein, 11 aa, Artificial Sequence
  Artifcially synthesized peptide
KTESPRTSGVL

SEQ ID NO: 1218 - protein, 9 aa, Artificial Sequence
  Artifcially synthesized peptide
KTESRQERY

SEQ ID NO: 1219 - protein, 10 aa, Artificial Sequence
  Artifcially synthesized peptide
KTFSIGKIAK

SEQ ID NO: 1220 - protein, 9 aa, Artificial Sequence
  Artifcially synthesized peptide
KTISLTDFL

SEQ ID NO: 1221 - protein, 9 aa, Artificial Sequence
  Artifcially synthesized peptide
KTKSIAEEL

SEQ ID NO: 1222 - protein, 9 aa, Artificial Sequence
  Artifcially synthesized peptide
KTKSMFFFL

SEQ ID NO: 1223 - protein, 9 aa, Artificial Sequence
  Artifcially synthesized peptide
KTLSLVKEL

SEQ ID NO: 1224 - protein, 12 aa, Artificial Sequence
  Artifcially synthesized peptide
KTLSPGKNGVVK

SEQ ID NO: 1225 - protein, 9 aa, Artificial Sequence
  Artifcially synthesized peptide
KTMSGTFLL

SEQ ID NO: 1226 - protein, 9 aa, Artificial Sequence
  Artifcially synthesized peptide
KTMSGTFLL

SEQ ID NO: 1227 - protein, 10 aa, Artificial Sequence
  Artifcially synthesized peptide
KTMSPSQMIM

SEQ ID NO: 1228 - protein, 9 aa, Artificial Sequence
  Artifcially synthesized peptide
KTPSHTRML

SEQ ID NO: 1229 - protein, 9 aa, Artificial Sequence
  Artifcially synthesized peptide
KTPSLTRRI

SEQ ID NO: 1230 - protein, 9 aa, Artificial Sequence
  Artifcially synthesized peptide
KTPTSPLKM

SEQ ID NO: 1231 - protein, 10 aa, Artificial Sequence
  Artifcially synthesized peptide
KTPTSPLKMK

SEQ ID NO: 1232 - protein, 10 aa, Artificial Sequence
  Artifcially synthesized peptide
KTPTSPLKMY

SEQ ID NO: 1233 - protein, 10 aa, Artificial Sequence
  Artifcially synthesized peptide
KTQSLPVTEK

SEQ ID NO: 1234 - protein, 9 aa, Artificial Sequence
  Artifcially synthesized peptide
KTRSLSVEI

SEQ ID NO: 1235 - protein, 11 aa, Artificial Sequence
  Artifcially synthesized peptide
KTRSLSVEIVY

SEQ ID NO: 1236 - protein, 10 aa, Artificial Sequence
  Artifcially synthesized peptide
KTVSEPNLKL

SEQ ID NO: 1237 - protein, 11 aa, Artificial Sequence
  Artifcially synthesized peptide
KTRSLSVEIVY

SEQ ID NO: 1238 - protein, 9 aa, Artificial Sequence
  Artifcially synthesized peptide
KTVSPSPAF

SEQ ID NO: 1239 - protein, 9 aa, Artificial Sequence
  Artifcially synthesized peptide
KTWKGSIGL

SEQ ID NO: 1240 - protein, 9 aa, Artificial Sequence
  Artifcially synthesized peptide
KVASLLHQV

SEQ ID NO: 1241 - protein, 11 aa, Artificial Sequence
  Artifcially synthesized peptide
KVDSPTVTTTL

SEQ ID NO: 1242 - protein, 8 aa, Artificial Sequence
  Artifcially synthesized peptide
KVDSPVIF

SEQ ID NO: 1243 - protein, 11 aa, Artificial Sequence
  Artifcially synthesized peptide
KVHGSLARAGK

SEQ ID NO: 1244 - protein, 11 aa, Artificial Sequence
  Artifcially synthesized peptide
KVHGSLARAGY

SEQ ID NO: 1245 - protein, 9 aa, Artificial Sequence
  Artifcially synthesized peptide
KVIPVTRSL

SEQ ID NO: 1246 - protein, 11 aa, Artificial Sequence
  Artifcially synthesized peptide
KVKSSPLIEKK

SEQ ID NO: 1247 - protein, 11 aa, Artificial Sequence
  Artifcially synthesized peptide
KVKSSPLIEKL

SEQ ID NO: 1248 - protein, 11 aa, Artificial Sequence
  Artifcially synthesized peptide
KVKSSPLIEKY

SEQ ID NO: 1249 - protein, 9 aa, Artificial Sequence
  Artifcially synthesized peptide
KVLSSLVTL

SEQ ID NO: 1250 - protein, 9 aa, Artificial Sequence
  Artifcially synthesized peptide
KVLSKEFHL

SEQ ID NO: 1251 - protein, 9 aa, Artificial Sequence
  Artifcially synthesized peptide
KVLSPTAAK

SEQ ID NO: 1252 - protein, 9 aa, Artificial Sequence
  Artifcially synthesized peptide
KVLSSLVTL

SEQ ID NO: 1253 - protein, 10 aa, Artificial Sequence
  Artifcially synthesized peptide
KVLSTEEMEL

SEQ ID NO: 1254 - protein, 9 aa, Artificial Sequence
  Artifcially synthesized peptide
KVLTPIKEK

SEQ ID NO: 1255 - protein, 10 aa, Artificial Sequence
  Artifcially synthesized peptide
KVLSTEEMEL

SEQ ID NO: 1256 - protein, 9 aa, Artificial Sequence
  Artifcially synthesized peptide
KVLTPIKEY

SEQ ID NO: 1257 - protein, 10 aa, Artificial Sequence
  Artifcially synthesized peptide
KVPDSPALAK

SEQ ID NO: 1258 - protein, 11 aa, Artificial Sequence
  Artifcially synthesized peptide
KVPDSPALAKK

SEQ ID NO: 1259 - protein, 11 aa, Artificial Sequence
  Artifcially synthesized peptide
KVPDSPALAKY

SEQ ID NO: 1260 - protein, 10 aa, Artificial Sequence
  Artifcially synthesized peptide
KVPDSPALAY

SEQ ID NO: 1261 - protein, 10 aa, Artificial Sequence
  Artifcially synthesized peptide
KVPTSPLKMY

SEQ ID NO: 1262 - protein, 9 aa, Artificial Sequence
  Artifcially synthesized peptide
KVQSLRRAL

SEQ ID NO: 1263 - protein, 9 aa, Artificial Sequence
  Artifcially synthesized peptide
KVQVTSLSV

SEQ ID NO: 1264 - protein, 9 aa, Artificial Sequence
  Artifcially synthesized peptide
KVYSSSEFL

SEQ ID NO: 1265 - protein, 9 aa, Artificial Sequence
  Artifcially synthesized peptide
KVYTPSISK

SEQ ID NO: 1266 - protein, 8 aa, Artificial Sequence
  Artifcially synthesized peptide
KYELSVIM

SEQ ID NO: 1267 - protein, 9 aa, Artificial Sequence
  Artifcially synthesized peptide
KYISGPHEL

SEQ ID NO: 1268 - protein, 10 aa, Artificial Sequence
  Artifcially synthesized peptide
KYPDVASPTL

SEQ ID NO: 1269 - protein, 10 aa, Artificial Sequence
  Artifcially synthesized peptide
KYSPGKLRGN

SEQ ID NO: 1270 - protein, 8 aa, Artificial Sequence
  Artifcially synthesized peptide
LADSPLKL

SEQ ID NO: 1271 - protein, 9 aa, Artificial Sequence
  Artifcially synthesized peptide
LALTRSSSL

SEQ ID NO: 1272 - protein, 10 aa, Artificial Sequence
  Artifcially synthesized peptide
LDEAGQRSTM

SEQ ID NO: 1273 - protein, 9 aa, Artificial Sequence
  Artifcially synthesized peptide
LEAPPSPSL

SEQ ID NO: 1274 - protein, 11 aa, Artificial Sequence
  Artifcially synthesized peptide
LEITPPSSEKL

SEQ ID NO: 1275 - protein, 9 aa, Artificial Sequence
  Artifcially synthesized peptide
LESPTTPLL

SEQ ID NO: 1276 - protein, 25 aa, Artificial Sequence
  Artifcially synthesized peptide
LGGGGAGLSGRASGGAQSPLRYLHV

SEQ ID NO: 1277 - protein, 9 aa, Artificial Sequence
  Artifcially synthesized peptide
LIDNSFNRY

SEQ ID NO: 1278 - protein, 9 aa, Artificial Sequence
  Artifcially synthesized peptide
LIMPRPNSV

SEQ ID NO: 1279 - protein, 9 aa, Artificial Sequence
  Artifcially synthesized peptide
LKLSYLTWV

SEQ ID NO: 1280 - protein, 9 aa, Artificial Sequence
  Artifcially synthesized peptide
LLARTPPAA

SEQ ID NO: 1281 - protein, 10 aa, Artificial Sequence
  Artifcially synthesized peptide
LLASPGHISV

SEQ ID NO: 1282 - protein, 10 aa, Artificial Sequence
  Artifcially synthesized peptide
LLDPSRSYSY

SEQ ID NO: 1283 - protein, 10 aa, Artificial Sequence
  Artifcially synthesized peptide
LLDTPVKTQY

SEQ ID NO: 1284 - protein, 9 aa, Artificial Sequence
  Artifcially synthesized peptide
LLFSPVTSL

SEQ ID NO: 1285 - protein, 9 aa, Artificial Sequence
  Artifcially synthesized peptide
LLFSPVTSV

SEQ ID NO: 1286 - protein, 9 aa, Artificial Sequence
  Artifcially synthesized peptide
LLLSEEVEL

SEQ ID NO: 1287 - protein, 9 aa, Artificial Sequence
  Artifcially synthesized peptide
LLNKSSPVK

SEQ ID NO: 1288 - protein, 10 aa, Artificial Sequence
  Artifcially synthesized peptide
LLNKSSPVKK

SEQ ID NO: 1289 - protein, 10 aa, Artificial Sequence
  Artifcially synthesized peptide
LLNKSSPVKY

SEQ ID NO: 1290 - protein, 9 aa, Artificial Sequence
  Artifcially synthesized peptide
LLNKTPPTA

SEQ ID NO: 1291 - protein, 9 aa, Artificial Sequence
  Artifcially synthesized peptide
LMFSPVTSL

SEQ ID NO: 1292 - protein, 9 aa, Artificial Sequence
  Artifcially synthesized peptide
LMFSPVTSV

SEQ ID NO: 1293 - protein, 9 aa, Artificial Sequence
  Artifcially synthesized peptide
LMHSFILKA

SEQ ID NO: 1294 - protein, 9 aa, Artificial Sequence
  Artifcially synthesized peptide
LMNKSSPVK

SEQ ID NO: 1295 - protein, 10 aa, Artificial Sequence
  Artifcially synthesized peptide
LMNKSSPVKK

SEQ ID NO: 1296 - protein, 10 aa, Artificial Sequence
  Artifcially synthesized peptide
LMNKSSPVKY

SEQ ID NO: 1297 - protein, 9 aa, Artificial Sequence
  Artifcially synthesized peptide
LPAFKRKTL

SEQ ID NO: 1298 - protein, 9 aa, Artificial Sequence
  Artifcially synthesized peptide
LPASPAGRL

SEQ ID NO: 1299 - protein, 9 aa, Artificial Sequence
  Artifcially synthesized peptide
LPASPAHQL

SEQ ID NO: 1300 - protein, 8 aa, Artificial Sequence
  Artifcially synthesized peptide
LPASPHQF

SEQ ID NO: 1301 - protein, 8 aa, Artificial Sequence
  Artifcially synthesized peptide
LPASPHQL

SEQ ID NO: 1302 - protein, 8 aa, Artificial Sequence
  Artifcially synthesized peptide
LPASPHQM

SEQ ID NO: 1303 - protein, 8 aa, Artificial Sequence
  Artifcially synthesized peptide
LPASPHQV

SEQ ID NO: 1304 - protein, 9 aa, Artificial Sequence
  Artifcially synthesized peptide
LPASPRARF

SEQ ID NO: 1305 - protein, 9 aa, Artificial Sequence
  Artifcially synthesized peptide
LPASPRARL

SEQ ID NO: 1306 - protein, 11 aa, Artificial Sequence
  Artifcially synthesized peptide
LPASPRARLSA

SEQ ID NO: 1307 - protein, 9 aa, Artificial Sequence
  Artifcially synthesized peptide
LPASPRARM

SEQ ID NO: 1308 - protein, 9 aa, Artificial Sequence
  Artifcially synthesized peptide
LPASPRARV

SEQ ID NO: 1309 - protein, 9 aa, Artificial Sequence
  Artifcially synthesized peptide
LPASPSVSL

SEQ ID NO: 1310 - protein, 9 aa, Artificial Sequence
  Artifcially synthesized peptide
LPASPVARR

SEQ ID NO: 1311 - protein, 9 aa, Artificial Sequence
  Artifcially synthesized peptide
LPDPGSPRL

SEQ ID NO: 1312 - protein, 9 aa, Artificial Sequence
  Artifcially synthesized peptide
LPESPRLTL

SEQ ID NO: 1313 - protein, 9 aa, Artificial Sequence
  Artifcially synthesized peptide
LPIFSRLSF

SEQ ID NO: 1314 - protein, 9 aa, Artificial Sequence
  Artifcially synthesized peptide
LPIFSRLSI

SEQ ID NO: 1315 - protein, 9 aa, Artificial Sequence
  Artifcially synthesized peptide
LPIFSRLSL

SEQ ID NO: 1316 - protein, 9 aa, Artificial Sequence
  Artifcially synthesized peptide
LPIFSRLSM

SEQ ID NO: 1317 - protein, 9 aa, Artificial Sequence
  Artifcially synthesized peptide
LPIFSRLSV

SEQ ID NO: 1318 - protein, 9 aa, Artificial Sequence
  Artifcially synthesized peptide
LPKARPMSL

SEQ ID NO: 1319 - protein, 9 aa, Artificial Sequence
  Artifcially synthesized peptide
LPKGLSASL

SEQ ID NO: 1320 - protein, 9 aa, Artificial Sequence
  Artifcially synthesized peptide
LPKGLSASL

SEQ ID NO: 1321 - protein, 10 aa, Artificial Sequence
  Artifcially synthesized peptide
LPKSPPYTAF

SEQ ID NO: 1322 - protein, 10 aa, Artificial Sequence
  Artifcially synthesized peptide
LPKSPPYTAL

SEQ ID NO: 1323 - protein, 10 aa, Artificial Sequence
  Artifcially synthesized peptide
LPKSPPYTAM

SEQ ID NO: 1324 - protein, 10 aa, Artificial Sequence
  Artifcially synthesized peptide
LPKSPPYTAV

SEQ ID NO: 1325 - protein, 9 aa, Artificial Sequence
  Artifcially synthesized peptide
LPLSPKETV

SEQ ID NO: 1326 - protein, 11 aa, Artificial Sequence
  Artifcially synthesized peptide
LPLSSSHLNVY

SEQ ID NO: 1327 - protein, 9 aa, Artificial Sequence
  Artifcially synthesized peptide
LPNSIASRF

SEQ ID NO: 1328 - protein, 10 aa, Artificial Sequence
  Artifcially synthesized peptide
LPRGSSPSVF

SEQ ID NO: 1329 - protein, 10 aa, Artificial Sequence
  Artifcially synthesized peptide
LPRGSSPSVL

SEQ ID NO: 1330 - protein, 10 aa, Artificial Sequence
  Artifcially synthesized peptide
LPRGSSPSVM

SEQ ID NO: 1331 - protein, 10 aa, Artificial Sequence
  Artifcially synthesized peptide
LPRGSSPSVV

SEQ ID NO: 1332 - protein, 10 aa, Artificial Sequence
  Artifcially synthesized peptide
LPRMISHSEL

SEQ ID NO: 1333 - protein, 8 aa, Artificial Sequence
  Artifcially synthesized peptide
LPRNSTMM

SEQ ID NO: 1334 - protein, 9 aa, Artificial Sequence
  Artifcially synthesized peptide
LPRPASPAL

SEQ ID NO: 1335 - protein, 10 aa, Artificial Sequence
  Artifcially synthesized peptide
LPRPLSPTKL

SEQ ID NO: 1336 - protein, 10 aa, Artificial Sequence
  Artifcially synthesized peptide
LPRPLSPTKL

SEQ ID NO: 1337 - protein, 9 aa, Artificial Sequence
  Artifcially synthesized peptide
LPRSPRLGH

SEQ ID NO: 1338 - protein, 9 aa, Artificial Sequence
  Artifcially synthesized peptide
LPRSSSMAA

SEQ ID NO: 1339 - protein, 11 aa, Artificial Sequence
  Artifcially synthesized peptide
LPRSSSMAAGL

SEQ ID NO: 1340 - protein, 9 aa, Artificial Sequence
  Artifcially synthesized peptide
LPRTPRPEL

SEQ ID NO: 1341 - protein, 10 aa, Artificial Sequence
  Artifcially synthesized peptide
LPRTPSASSL

SEQ ID NO: 1342 - protein, 9 aa, Artificial Sequence
  Artifcially synthesized peptide
LPRTPSYSI

SEQ ID NO: 1343 - protein, 9 aa, Artificial Sequence
  Artifcially synthesized peptide
LPSESVSSL

SEQ ID NO: 1344 - protein, 10 aa, Artificial Sequence
  Artifcially synthesized peptide
LPSPRGQRVI

SEQ ID NO: 1345 - protein, 10 aa, Artificial Sequence
  Artifcially synthesized peptide
LPSPTATSQL

SEQ ID NO: 1346 - protein, 9 aa, Artificial Sequence
  Artifcially synthesized peptide
LPSSGRSSL

SEQ ID NO: 1347 - protein, 9 aa, Artificial Sequence
  Artifcially synthesized peptide
LPTSLPSSL

SEQ ID NO: 1348 - protein, 10 aa, Artificial Sequence
  Artifcially synthesized peptide
LPTSPLAMEY

SEQ ID NO: 1349 - protein, 10 aa, Artificial Sequence
  Artifcially synthesized peptide
LPVSPGHRKT

SEQ ID NO: 1350 - protein, 9 aa, Artificial Sequence
  Artifcially synthesized peptide
LPVSPRLQL

SEQ ID NO: 1351 - protein, 11 aa, Artificial Sequence
  Artifcially synthesized peptide
LPYPVSPKQKY

SEQ ID NO: 1352 - protein, 10 aa, Artificial Sequence
  Artifcially synthesized peptide
LQHSFSFAGF

SEQ ID NO: 1353 - protein, 11 aa, Artificial Sequence
  Artifcially synthesized peptide
LQISPPLHQHL

SEQ ID NO: 1354 - protein, 9 aa, Artificial Sequence
  Artifcially synthesized peptide
LQISPVSSY

SEQ ID NO: 1355 - protein, 10 aa, Artificial Sequence
  Artifcially synthesized peptide
LQISPVSSYA

SEQ ID NO: 1356 - protein, 9 aa, Artificial Sequence
  Artifcially synthesized peptide
LQLPSPTAT

SEQ ID NO: 1357 - protein, 11 aa, Artificial Sequence
  Artifcially synthesized peptide
LQLSPLKGLSL

SEQ ID NO: 1358 - protein, 9 aa, Artificial Sequence
  Artifcially synthesized peptide
LQNITENQL

SEQ ID NO: 1359 - protein, 9 aa, Artificial Sequence
  Artifcially synthesized peptide
LSASFRSLY

SEQ ID NO: 1360 - protein, 9 aa, Artificial Sequence
  Artifcially synthesized peptide
LSASPLTSL

SEQ ID NO: 1361 - protein, 9 aa, Artificial Sequence
  Artifcially synthesized peptide
LSDDGKASL

SEQ ID NO: 1362 - protein, 10 aa, Artificial Sequence
  Artifcially synthesized peptide
LSDPSRSYSY

SEQ ID NO: 1363 - protein, 10 aa, Artificial Sequence
  Artifcially synthesized peptide
LSDSDTEAKL

SEQ ID NO: 1364 - protein, 10 aa, Artificial Sequence
  Artifcially synthesized peptide
LSDSDTEAKY

SEQ ID NO: 1365 - protein, 10 aa, Artificial Sequence
  Artifcially synthesized peptide
LSDSPSMGRY

SEQ ID NO: 1366 - protein, 10 aa, Artificial Sequence
  Artifcially synthesized peptide
LSDTPVKTQY

SEQ ID NO: 1367 - protein, 9 aa, Artificial Sequence
  Artifcially synthesized peptide
LSEIKFNSY

SEQ ID NO: 1368 - protein, 10 aa, Artificial Sequence
  Artifcially synthesized peptide
LSEPSRSYSY

SEQ ID NO: 1369 - protein, 10 aa, Artificial Sequence
  Artifcially synthesized peptide
LSESDTEAKL

SEQ ID NO: 1370 - protein, 10 aa, Artificial Sequence
  Artifcially synthesized peptide
LSESDTEAKY

SEQ ID NO: 1371 - protein, 10 aa, Artificial Sequence
  Artifcially synthesized peptide
LSETPVKTQY

SEQ ID NO: 1372 - protein, 18 aa, Artificial Sequence
  Artifcially synthesized peptide
LSKFRMPQPSSGRESPRH

SEQ ID NO: 1373 - protein, 9 aa, Artificial Sequence
  Artifcially synthesized peptide
LSKSEHSLF

SEQ ID NO: 1374 - protein, 10 aa, Artificial Sequence
  Artifcially synthesized peptide
LSSSPPATHF

SEQ ID NO: 1375 - protein, 9 aa, Artificial Sequence
  Artifcially synthesized peptide
LSSSVIREL

SEQ ID NO: 1376 - protein, 10 aa, Artificial Sequence
  Artifcially synthesized peptide
LTDPSRSYSY

SEQ ID NO: 1377 - protein, 10 aa, Artificial Sequence
  Artifcially synthesized peptide
LTDPSSPTIS

SEQ ID NO: 1378 - protein, 12 aa, Artificial Sequence
  Artifcially synthesized peptide
LTDPSSPTISSY

SEQ ID NO: 1379 - protein, 10 aa, Artificial Sequence
  Artifcially synthesized peptide
LTDSDTEAKL

SEQ ID NO: 1380 - protein, 10 aa, Artificial Sequence
  Artifcially synthesized peptide
LTDSDTEAKY

SEQ ID NO: 1381 - protein, 10 aa, Artificial Sequence
  Artifcially synthesized peptide
LTDTPVKTQY

SEQ ID NO: 1382 - protein, 10 aa, Artificial Sequence
  Artifcially synthesized peptide
LTEPSRSYSY

SEQ ID NO: 1383 - protein, 10 aa, Artificial Sequence
  Artifcially synthesized peptide
LTESDTEAKL

SEQ ID NO: 1384 - protein, 10 aa, Artificial Sequence
  Artifcially synthesized peptide
LTESDTEAKY

SEQ ID NO: 1385 - protein, 10 aa, Artificial Sequence
  Artifcially synthesized peptide
LTETPVKTQY

SEQ ID NO: 1386 - protein, 9 aa, Artificial Sequence
  Artifcially synthesized peptide
LTHSLVLHY

SEQ ID NO: 1387 - protein, 9 aa, Artificial Sequence
  Artifcially synthesized peptide
LTKSPLAQM

SEQ ID NO: 1388 - protein, 9 aa, Artificial Sequence
  Artifcially synthesized peptide
LTLSPKLQL

SEQ ID NO: 1389 - protein, 9 aa, Artificial Sequence
  Artifcially synthesized peptide
LTSSRLLKL

SEQ ID NO: 1390 - protein, 9 aa, Artificial Sequence
  Artifcially synthesized peptide
LTYRRRLSY

SEQ ID NO: 1391 - protein, 9 aa, Artificial Sequence
  Artifcially synthesized peptide
LVASPRLEK

SEQ ID NO: 1392 - protein, 9 aa, Artificial Sequence
  Artifcially synthesized peptide
LVDSVAKTM

SEQ ID NO: 1393 - protein, 10 aa, Artificial Sequence
  Artifcially synthesized peptide
LVVSPGQQTL

SEQ ID NO: 1394 - protein, 9 aa, Artificial Sequence
  Artifcially synthesized peptide
LYTYIQSRF

SEQ ID NO: 1395 - protein, 11 aa, Artificial Sequence
  Artifcially synthesized peptide
MLAESPSVPRL

SEQ ID NO: 1396 - protein, 11 aa, Artificial Sequence
  Artifcially synthesized peptide
MLAESPSVPRV

SEQ ID NO: 1397 - protein, 9 aa, Artificial Sequence
  Artifcially synthesized peptide
MLPSILNQL

SEQ ID NO: 1398 - protein, 10 aa, Artificial Sequence
  Artifcially synthesized peptide
MLRSPPRVSK

SEQ ID NO: 1399 - protein, 10 aa, Artificial Sequence
  Artifcially synthesized peptide
MMRSPPRVSK

SEQ ID NO: 1400 - protein, 10 aa, Artificial Sequence
  Artifcially synthesized peptide
MPGSPTKTVY

SEQ ID NO: 1401 - protein, 9 aa, Artificial Sequence
  Artifcially synthesized peptide
MPHSPTLRV

SEQ ID NO: 1402 - protein, 9 aa, Artificial Sequence
  Artifcially synthesized peptide
MPKFRMPSL

SEQ ID NO: 1403 - protein, 12 aa, Artificial Sequence
  Artifcially synthesized peptide
MPLSPDPSHTTL

SEQ ID NO: 1404 - protein, 9 aa, Artificial Sequence
  Artifcially synthesized peptide
MPMRSPSKL

SEQ ID NO: 1405 - protein, 9 aa, Artificial Sequence
  Artifcially synthesized peptide
MPNSPAPHF

SEQ ID NO: 1406 - protein, 10 aa, Artificial Sequence
  Artifcially synthesized peptide
MPREPSATRL

SEQ ID NO: 1407 - protein, 17 aa, Artificial Sequence
  Artifcially synthesized peptide
MPRPSIKKAQNSQAARQ

SEQ ID NO: 1408 - protein, 10 aa, Artificial Sequence
  Artifcially synthesized peptide
MPRQPSATRF

SEQ ID NO: 1409 - protein, 10 aa, Artificial Sequence
  Artifcially synthesized peptide
MPRQPSATRL

SEQ ID NO: 1410 - protein, 10 aa, Artificial Sequence
  Artifcially synthesized peptide
MPRQPSATRM

SEQ ID NO: 1411 - protein, 10 aa, Artificial Sequence
  Artifcially synthesized peptide
MPRQPSATRV

SEQ ID NO: 1412 - protein, 11 aa, Artificial Sequence
  Artifcially synthesized peptide
MPSPATLSHSL

SEQ ID NO: 1413 - protein, 10 aa, Artificial Sequence
  Artifcially synthesized peptide
MPSPGGRITL

SEQ ID NO: 1414 - protein, 9 aa, Artificial Sequence
  Artifcially synthesized peptide
MPSPVSPKL

SEQ ID NO: 1415 - protein, 9 aa, Artificial Sequence
  Artifcially synthesized peptide
MPVPTTPEF

SEQ ID NO: 1416 - protein, 9 aa, Artificial Sequence
  Artifcially synthesized peptide
MPVPTTPEF

SEQ ID NO: 1417 - protein, 9 aa, Artificial Sequence
  Artifcially synthesized peptide
MPVPTTPEF

SEQ ID NO: 1418 - protein, 10 aa, Artificial Sequence
  Artifcially synthesized peptide
MPVRPTTNTF

SEQ ID NO: 1419 - protein, 9 aa, Artificial Sequence
  Artifcially synthesized peptide
MPVTSSSFF

SEQ ID NO: 1420 - protein, 9 aa, Artificial Sequence
  Artifcially synthesized peptide
MRLSRELQF

SEQ ID NO: 1421 - protein, 9 aa, Artificial Sequence
  Artifcially synthesized peptide
MRLSRELQK

SEQ ID NO: 1422 - protein, 9 aa, Artificial Sequence
  Artifcially synthesized peptide
MRLSRELQL

SEQ ID NO: 1423 - protein, 9 aa, Artificial Sequence
  Artifcially synthesized peptide
MRLSRELQM

SEQ ID NO: 1424 - protein, 9 aa, Artificial Sequence
  Artifcially synthesized peptide
MRLSRELQR

SEQ ID NO: 1425 - protein, 9 aa, Artificial Sequence
  Artifcially synthesized peptide
MRLSRELQY

SEQ ID NO: 1426 - protein, 9 aa, Artificial Sequence
  Artifcially synthesized peptide
MSDTYRLKY

SEQ ID NO: 1427 - protein, 9 aa, Artificial Sequence
  Artifcially synthesized peptide
MSETYRLKY

SEQ ID NO: 1428 - protein, 9 aa, Artificial Sequence
  Artifcially synthesized peptide
MTDTYRLKY

SEQ ID NO: 1429 - protein, 9 aa, Artificial Sequence
  Artifcially synthesized peptide
MTETYRLKY

SEQ ID NO: 1430 - protein, 9 aa, Artificial Sequence
  Artifcially synthesized peptide
MTKSSPLKI

SEQ ID NO: 1431 - protein, 9 aa, Artificial Sequence
  Artifcially synthesized peptide
MTKSSPLKI

SEQ ID NO: 1432 - protein, 9 aa, Artificial Sequence
  Artifcially synthesized peptide
MTKSSPLKI

SEQ ID NO: 1433 - protein, 10 aa, Artificial Sequence
  Artifcially synthesized peptide
MTRSPPRVSK

SEQ ID NO: 1434 - protein, 10 aa, Artificial Sequence
  Artifcially synthesized peptide
MTRSPPRVSY

SEQ ID NO: 1435 - protein, 10 aa, Artificial Sequence
  Artifcially synthesized peptide
NAESGRGQVM

SEQ ID NO: 1436 - protein, 8 aa, Artificial Sequence
  Artifcially synthesized peptide
NAISLPTI

SEQ ID NO: 1437 - protein, 9 aa, Artificial Sequence
  Artifcially synthesized peptide
NEFHSPIGL

SEQ ID NO: 1438 - protein, 10 aa, Artificial Sequence
  Artifcially synthesized peptide
NFKSPVKTIR

SEQ ID NO: 1439 - protein, 9 aa, Artificial Sequence
  Artifcially synthesized peptide
NGIIRSQSF

SEQ ID NO: 1440 - protein, 11 aa, Artificial Sequence
  Artifcially synthesized peptide
NIASPGTVHKR

SEQ ID NO: 1441 - protein, 9 aa, Artificial Sequence
  Artifcially synthesized peptide
NIPSFIVRL

SEQ ID NO: 1442 - protein, 21 aa, Artificial Sequence
  Artifcially synthesized peptide
NLELSKFRMPQPSSGRESPRH

SEQ ID NO: 1443 - protein, 11 aa, Artificial Sequence
  Artifcially synthesized peptide
NLGSRNHVHQL

SEQ ID NO: 1444 - protein, 11 aa, Artificial Sequence
  Artifcially synthesized peptide
NLISPVRNGAV

SEQ ID NO: 1445 - protein, 12 aa, Artificial Sequence
  Artifcially synthesized peptide
NLLSPDGKMISV

SEQ ID NO: 1446 - protein, 9 aa, Artificial Sequence
  Artifcially synthesized peptide
NLVERKNSK

SEQ ID NO: 1447 - protein, 9 aa, Artificial Sequence
  Artifcially synthesized peptide
NLVERKNSK

SEQ ID NO: 1448 - protein, 9 aa, Artificial Sequence
  Artifcially synthesized peptide
NLVERKNSL

SEQ ID NO: 1449 - protein, 9 aa, Artificial Sequence
  Artifcially synthesized peptide
NMDSPGPML

SEQ ID NO: 1450 - protein, 9 aa, Artificial Sequence
  Artifcially synthesized peptide
NMVERKNSK

SEQ ID NO: 1451 - protein, 9 aa, Artificial Sequence
  Artifcially synthesized peptide
NMVERKNSL

SEQ ID NO: 1452 - protein, 9 aa, Artificial Sequence
  Artifcially synthesized peptide
NPSSPEFFM

SEQ ID NO: 1453 - protein, 8 aa, Artificial Sequence
  Artifcially synthesized peptide
NPVSLPSL

SEQ ID NO: 1454 - protein, 13 aa, Artificial Sequence
  Artifcially synthesized peptide
NRAMRRVSSVPSR

SEQ ID NO: 1455 - protein, 15 aa, Artificial Sequence
  Artifcially synthesized peptide
NRAMRRVSSVPSRAQ

SEQ ID NO: 1456 - protein, 9 aa, Artificial Sequence
  Artifcially synthesized peptide
NRFSPKASL

SEQ ID NO: 1457 - protein, 9 aa, Artificial Sequence
  Artifcially synthesized peptide
NRLSKGLQI

SEQ ID NO: 1458 - protein, 9 aa, Artificial Sequence
  Artifcially synthesized peptide
NRMSRRIVL

SEQ ID NO: 1459 - protein, 9 aa, Artificial Sequence
  Artifcially synthesized peptide
NRRKSALAL

SEQ ID NO: 1460 - protein, 9 aa, Artificial Sequence
  Artifcially synthesized peptide
NRRSPPPSL

SEQ ID NO: 1461 - protein, 13 aa, Artificial Sequence
  Artifcially synthesized peptide
NRSWKYNQSISLR

SEQ ID NO: 1462 - protein, 15 aa, Artificial Sequence
  Artifcially synthesized peptide
NRSWKYNQSISLRRP

SEQ ID NO: 1463 - protein, 10 aa, Artificial Sequence
  Artifcially synthesized peptide
NRYTNRVVTF

SEQ ID NO: 1464 - protein, 10 aa, Artificial Sequence
  Artifcially synthesized peptide
NRYTNRVVTK

SEQ ID NO: 1465 - protein, 10 aa, Artificial Sequence
  Artifcially synthesized peptide
NRYTNRVVTL

SEQ ID NO: 1466 - protein, 10 aa, Artificial Sequence
  Artifcially synthesized peptide
NRYTNRVVTM

SEQ ID NO: 1467 - protein, 10 aa, Artificial Sequence
  Artifcially synthesized peptide
NRYTNRVVTR

SEQ ID NO: 1468 - protein, 10 aa, Artificial Sequence
  Artifcially synthesized peptide
NRYTNRVVTY

SEQ ID NO: 1469 - protein, 9 aa, Artificial Sequence
  Artifcially synthesized peptide
NSDLPTSPL

SEQ ID NO: 1470 - protein, 8 aa, Artificial Sequence
  Artifcially synthesized peptide
NSDSPLRY

SEQ ID NO: 1471 - protein, 8 aa, Artificial Sequence
  Artifcially synthesized peptide
NSESPLRY

SEQ ID NO: 1472 - protein, 9 aa, Artificial Sequence
  Artifcially synthesized peptide
NSLSPRSSL

SEQ ID NO: 1473 - protein, 9 aa, Artificial Sequence
  Artifcially synthesized peptide
NSVSPSESL

SEQ ID NO: 1474 - protein, 8 aa, Artificial Sequence
  Artifcially synthesized peptide
NTDSPLRY

SEQ ID NO: 1475 - protein, 8 aa, Artificial Sequence
  Artifcially synthesized peptide
NTESPLRY

SEQ ID NO: 1476 - protein, 9 aa, Artificial Sequence
  Artifcially synthesized peptide
NYQLSPTKL

SEQ ID NO: 1477 - protein, 9 aa, Artificial Sequence
  Artifcially synthesized peptide
NYVERKNSK

SEQ ID NO: 1478 - protein, 9 aa, Artificial Sequence
  Artifcially synthesized peptide
NYVERKNSL

SEQ ID NO: 1479 - protein, 9 aa, Artificial Sequence
  Artifcially synthesized peptide
NYVERKNSY

SEQ ID NO: 1480 - protein, 9 aa, Artificial Sequence
  Artifcially synthesized peptide
PEVSPRPAL

SEQ ID NO: 1481 - protein, 9 aa, Artificial Sequence
  Artifcially synthesized peptide
PFKVSPLTF

SEQ ID NO: 1482 - protein, 8 aa, Artificial Sequence
  Artifcially synthesized peptide
PIFNRISV

SEQ ID NO: 1483 - protein, 9 aa, Artificial Sequence
  Artifcially synthesized peptide
PIFPMARSI

SEQ ID NO: 1484 - protein, 16 aa, Artificial Sequence
  Artifcially synthesized peptide
PLVSSSDSPPRPQPAF

SEQ ID NO: 1485 - protein, 9 aa, Artificial Sequence
  Artifcially synthesized peptide
PMVTLSLNL

SEQ ID NO: 1486 - protein, 21 aa, Artificial Sequence
  Artifcially synthesized peptide
PPLPEDSIKVIRNMRAASPPA

SEQ ID NO: 1487 - protein, 9 aa, Artificial Sequence
  Artifcially synthesized peptide
PPSTSAAAL

SEQ ID NO: 1488 - protein, 12 aa, Artificial Sequence
  Artifcially synthesized peptide
PRFSLDAEIDSL

SEQ ID NO: 1489 - protein, 11 aa, Artificial Sequence
  Artifcially synthesized peptide
PRPANSGGVDL

SEQ ID NO: 1490 - protein, 11 aa, Artificial Sequence
  Artifcially synthesized peptide
PRPSPGSNSKV

SEQ ID NO: 1491 - protein, 10 aa, Artificial Sequence
  Artifcially synthesized peptide
PRPSPRQNSI

SEQ ID NO: 1492 - protein, 10 aa, Artificial Sequence
  Artifcially synthesized peptide
PRQRATSNVF

SEQ ID NO: 1493 - protein, 8 aa, Artificial Sequence
  Artifcially synthesized peptide
PRSPPRAL

SEQ ID NO: 1494 - protein, 9 aa, Artificial Sequence
  Artifcially synthesized peptide
PRWSPAVSA

SEQ ID NO: 1495 - protein, 12 aa, Artificial Sequence
  Artifcially synthesized peptide
PSPPSPLEKTPL

SEQ ID NO: 1496 - protein, 9 aa, Artificial Sequence
  Artifcially synthesized peptide
PTSPLAMEY

SEQ ID NO: 1497 - protein, 9 aa, Artificial Sequence
  Artifcially synthesized peptide
PTSPLAMEY

SEQ ID NO: 1498 - protein, 9 aa, Artificial Sequence
  Artifcially synthesized peptide
PTSPLAMEY

SEQ ID NO: 1499 - protein, 9 aa, Artificial Sequence
  Artifcially synthesized peptide
PVRDPTRSP

SEQ ID NO: 1500 - protein, 11 aa, Artificial Sequence
  Artifcially synthesized peptide
PWIPPSSPTTF

SEQ ID NO: 1501 - protein, 11 aa, Artificial Sequence
  Artifcially synthesized peptide
PYDPALGSPSR

SEQ ID NO: 1502 - protein, 13 aa, Artificial Sequence
  Artifcially synthesized peptide
PYDPALGSPSRLF

SEQ ID NO: 1503 - protein, 14 aa, Artificial Sequence
  Artifcially synthesized peptide
QAASNFKSPVKTIR

SEQ ID NO: 1504 - protein, 9 aa, Artificial Sequence
  Artifcially synthesized peptide
QAFLRSVSM

SEQ ID NO: 1505 - protein, 9 aa, Artificial Sequence
  Artifcially synthesized peptide
QEKSPKQAL

SEQ ID NO: 1506 - protein, 8 aa, Artificial Sequence
  Artifcially synthesized peptide
QKKISTNL

SEQ ID NO: 1507 - protein, 9 aa, Artificial Sequence
  Artifcially synthesized peptide
QLDRISVYY

SEQ ID NO: 1508 - protein, 10 aa, Artificial Sequence
  Artifcially synthesized peptide
QLDSPQRALY

SEQ ID NO: 1509 - protein, 10 aa, Artificial Sequence
  Artifcially synthesized peptide
QLESPQRALY

SEQ ID NO: 1510 - protein, 10 aa, Artificial Sequence
  Artifcially synthesized peptide
QLFSPKKGQK

SEQ ID NO: 1511 - protein, 9 aa, Artificial Sequence
  Artifcially synthesized peptide
QLSLRTVSL

SEQ ID NO: 1512 - protein, 10 aa, Artificial Sequence
  Artifcially synthesized peptide
QMFSPKKGQK

SEQ ID NO: 1513 - protein, 10 aa, Artificial Sequence
  Artifcially synthesized peptide
QMFSPKKGQK

SEQ ID NO: 1514 - protein, 9 aa, Artificial Sequence
  Artifcially synthesized peptide
QPQRRSLRL

SEQ ID NO: 1515 - protein, 14 aa, Artificial Sequence
  Artifcially synthesized peptide
QPRNSLPASPAHQL

SEQ ID NO: 1516 - protein, 11 aa, Artificial Sequence
  Artifcially synthesized peptide
QPRSPGPDYSF

SEQ ID NO: 1517 - protein, 11 aa, Artificial Sequence
  Artifcially synthesized peptide
QPRSPGPDYSL

SEQ ID NO: 1518 - protein, 11 aa, Artificial Sequence
  Artifcially synthesized peptide
QPRSPGPDYSM

SEQ ID NO: 1519 - protein, 11 aa, Artificial Sequence
  Artifcially synthesized peptide
QPRSPGPDYSV

SEQ ID NO: 1520 - protein, 10 aa, Artificial Sequence
  Artifcially synthesized peptide
QPRSPVPSAF

SEQ ID NO: 1521 - protein, 10 aa, Artificial Sequence
  Artifcially synthesized peptide
QPRTPHSPPL

SEQ ID NO: 1522 - protein, 10 aa, Artificial Sequence
  Artifcially synthesized peptide
QPRTPSPLVF

SEQ ID NO: 1523 - protein, 10 aa, Artificial Sequence
  Artifcially synthesized peptide
QPRTPSPLVF

SEQ ID NO: 1524 - protein, 10 aa, Artificial Sequence
  Artifcially synthesized peptide
QPRTPSPLVF

SEQ ID NO: 1525 - protein, 10 aa, Artificial Sequence
  Artifcially synthesized peptide
QPRTPSPLVL

SEQ ID NO: 1526 - protein, 10 aa, Artificial Sequence
  Artifcially synthesized peptide
QPRTPSPLVL

SEQ ID NO: 1527 - protein, 10 aa, Artificial Sequence
  Artifcially synthesized peptide
QPRTPSPLVL

SEQ ID NO: 1528 - protein, 10 aa, Artificial Sequence
  Artifcially synthesized peptide
QPRTPSPLVM

SEQ ID NO: 1529 - protein, 10 aa, Artificial Sequence
  Artifcially synthesized peptide
QPRTPSPLVM

SEQ ID NO: 1530 - protein, 10 aa, Artificial Sequence
  Artifcially synthesized peptide
QPRTPSPLVM

SEQ ID NO: 1531 - protein, 10 aa, Artificial Sequence
  Artifcially synthesized peptide
QPRTPSPLVV

SEQ ID NO: 1532 - protein, 10 aa, Artificial Sequence
  Artifcially synthesized peptide
QPRTPSPLVV

SEQ ID NO: 1533 - protein, 10 aa, Artificial Sequence
  Artifcially synthesized peptide
QPRTPSPLVV

SEQ ID NO: 1534 - protein, 10 aa, Artificial Sequence
  Artifcially synthesized peptide
QPSSPRVNGL

SEQ ID NO: 1535 - protein, 9 aa, Artificial Sequence
  Artifcially synthesized peptide
QPSTPDPFL

SEQ ID NO: 1536 - protein, 10 aa, Artificial Sequence
  Artifcially synthesized peptide
QRLSPLSAAY

SEQ ID NO: 1537 - protein, 10 aa, Artificial Sequence
  Artifcially synthesized peptide
QSDSPQRALY

SEQ ID NO: 1538 - protein, 10 aa, Artificial Sequence
  Artifcially synthesized peptide
QSESPQRALY

SEQ ID NO: 1539 - protein, 9 aa, Artificial Sequence
  Artifcially synthesized peptide
QSLLSPLVL

SEQ ID NO: 1540 - protein, 10 aa, Artificial Sequence
  Artifcially synthesized peptide
QTDSPQRALY

SEQ ID NO: 1541 - protein, 10 aa, Artificial Sequence
  Artifcially synthesized peptide
QTESPQRALY

SEQ ID NO: 1542 - protein, 9 aa, Artificial Sequence
  Artifcially synthesized peptide
QTISPLSTY

SEQ ID NO: 1543 - protein, 9 aa, Artificial Sequence
  Artifcially synthesized peptide
QTPSPRLAL

SEQ ID NO: 1544 - protein, 10 aa, Artificial Sequence
  Artifcially synthesized peptide
QTSIQSPSSY

SEQ ID NO: 1545 - protein, 28 aa, Artificial Sequence
  Artifcially synthesized peptide
QVAMPVKKSPRRSSSDEQGLSYSSLKNV

SEQ ID NO: 1546 - protein, 10 aa, Artificial Sequence
  Artifcially synthesized peptide
QVDPKKRISM

SEQ ID NO: 1547 - protein, 10 aa, Artificial Sequence
  Artifcially synthesized peptide
QVFSPKKGQK

SEQ ID NO: 1548 - protein, 10 aa, Artificial Sequence
  Artifcially synthesized peptide
QVFSPKKGQY

SEQ ID NO: 1549 - protein, 9 aa, Artificial Sequence
  Artifcially synthesized peptide
RAASTARHL

SEQ ID NO: 1550 - protein, 9 aa, Artificial Sequence
  Artifcially synthesized peptide
RAATPLPSL

SEQ ID NO: 1551 - protein, 9 aa, Artificial Sequence
  Artifcially synthesized peptide
RADSPGRLV

SEQ ID NO: 1552 - protein, 8 aa, Artificial Sequence
  Artifcially synthesized peptide
RADSPVHM

SEQ ID NO: 1553 - protein, 9 aa, Artificial Sequence
  Artifcially synthesized peptide
RADSPVHME

SEQ ID NO: 1554 - protein, 10 aa, Artificial Sequence
  Artifcially synthesized peptide
RADSPVHMEQ

SEQ ID NO: 1555 - protein, 11 aa, Artificial Sequence
  Artifcially synthesized peptide
RADSPVHMEQQ

SEQ ID NO: 1556 - protein, 9 aa, Artificial Sequence
  Artifcially synthesized peptide
RAESDFVKF

SEQ ID NO: 1557 - protein, 11 aa, Artificial Sequence
  Artifcially synthesized peptide
RAESPGPGSRL

SEQ ID NO: 1558 - protein, 9 aa, Artificial Sequence
  Artifcially synthesized peptide
RAESPTPGM

SEQ ID NO: 1559 - protein, 10 aa, Artificial Sequence
  Artifcially synthesized peptide
RAFSFSKTPK

SEQ ID NO: 1560 - protein, 10 aa, Artificial Sequence
  Artifcially synthesized peptide
RAFSFSKTPY

SEQ ID NO: 1561 - protein, 9 aa, Artificial Sequence
  Artifcially synthesized peptide
RAFSVKFEV

SEQ ID NO: 1562 - protein, 9 aa, Artificial Sequence
  Artifcially synthesized peptide
RAGSFSRFY

SEQ ID NO: 1563 - protein, 9 aa, Artificial Sequence
  Artifcially synthesized peptide
RAHSEPLAL

SEQ ID NO: 1564 - protein, 9 aa, Artificial Sequence
  Artifcially synthesized peptide
RAHSLARQM

SEQ ID NO: 1565 - protein, 9 aa, Artificial Sequence
  Artifcially synthesized peptide
RAHSSPASL

SEQ ID NO: 1566 - protein, 11 aa, Artificial Sequence
  Artifcially synthesized peptide
RAHTPTPGIYM

SEQ ID NO: 1567 - protein, 9 aa, Artificial Sequence
  Artifcially synthesized peptide
RAISPREKI

SEQ ID NO: 1568 - protein, 9 aa, Artificial Sequence
  Artifcially synthesized peptide
RAKRISQLF

SEQ ID NO: 1569 - protein, 9 aa, Artificial Sequence
  Artifcially synthesized peptide
RAKSPISLK

SEQ ID NO: 1570 - protein, 9 aa, Artificial Sequence
  Artifcially synthesized peptide
RAKSPISLY

SEQ ID NO: 1571 - protein, 9 aa, Artificial Sequence
  Artifcially synthesized peptide
RALSPRVAA

SEQ ID NO: 1572 - protein, 11 aa, Artificial Sequence
  Artifcially synthesized peptide
RALSSSVIREL

SEQ ID NO: 1573 - protein, 9 aa, Artificial Sequence
  Artifcially synthesized peptide
RALTPSPVM

SEQ ID NO: 1574 - protein, 9 aa, Artificial Sequence
  Artifcially synthesized peptide
RAPSPSSRF

SEQ ID NO: 1575 - protein, 9 aa, Artificial Sequence
  Artifcially synthesized peptide
RAPSPSSRL

SEQ ID NO: 1576 - protein, 9 aa, Artificial Sequence
  Artifcially synthesized peptide
RAPSPSSRM

SEQ ID NO: 1577 - protein, 9 aa, Artificial Sequence
  Artifcially synthesized peptide
RAPSPSSRV

SEQ ID NO: 1578 - protein, 10 aa, Artificial Sequence
  Artifcially synthesized peptide
RARGISPIVF

SEQ ID NO: 1579 - protein, 9 aa, Artificial Sequence
  Artifcially synthesized peptide
RASSDIVSL

SEQ ID NO: 1580 - protein, 9 aa, Artificial Sequence
  Artifcially synthesized peptide
RASSLSITV

SEQ ID NO: 1581 - protein, 9 aa, Artificial Sequence
  Artifcially synthesized peptide
RASSPFRRV

SEQ ID NO: 1582 - protein, 8 aa, Artificial Sequence
  Artifcially synthesized peptide
RASVFVKL

SEQ ID NO: 1583 - protein, 8 aa, Artificial Sequence
  Artifcially synthesized peptide
RATSLPSL

SEQ ID NO: 1584 - protein, 8 aa, Artificial Sequence
  Artifcially synthesized peptide
RATSLPSL

SEQ ID NO: 1585 - protein, 8 aa, Artificial Sequence
  Artifcially synthesized peptide
RATSLPSL

SEQ ID NO: 1586 - protein, 9 aa, Artificial Sequence
  Artifcially synthesized peptide
RATSNVFAM

SEQ ID NO: 1587 - protein, 9 aa, Artificial Sequence
  Artifcially synthesized peptide
RATSPLVSL

SEQ ID NO: 1588 - protein, 9 aa, Artificial Sequence
  Artifcially synthesized peptide
RATSRCLQL

SEQ ID NO: 1589 - protein, 9 aa, Artificial Sequence
  Artifcially synthesized peptide
RAVSPFAKI

SEQ ID NO: 1590 - protein, 10 aa, Artificial Sequence
  Artifcially synthesized peptide
RETSPNRIGL

SEQ ID NO: 1591 - protein, 9 aa, Artificial Sequence
  Artifcially synthesized peptide
REAPSPLMI

SEQ ID NO: 1592 - protein, 10 aa, Artificial Sequence
  Artifcially synthesized peptide
REASIELPSM

SEQ ID NO: 1593 - protein, 9 aa, Artificial Sequence
  Artifcially synthesized peptide
REASPAPLA

SEQ ID NO: 1594 - protein, 13 aa, Artificial Sequence
  Artifcially synthesized peptide
REASPLSSNKLIL

SEQ ID NO: 1595 - protein, 9 aa, Artificial Sequence
  Artifcially synthesized peptide
REASPRLRV

SEQ ID NO: 1596 - protein, 10 aa, Artificial Sequence
  Artifcially synthesized peptide
REASPSRLSV

SEQ ID NO: 1597 - protein, 11 aa, Artificial Sequence
  Artifcially synthesized peptide
REDSTPGKVFL

SEQ ID NO: 1598 - protein, 10 aa, Artificial Sequence
  Artifcially synthesized peptide
REESPLRIKM

SEQ ID NO: 1599 - protein, 10 aa, Artificial Sequence
  Artifcially synthesized peptide
REGSFRVTTA

SEQ ID NO: 1600 - protein, 10 aa, Artificial Sequence
  Artifcially synthesized peptide
REGSGRFSLP

SEQ ID NO: 1601 - protein, 10 aa, Artificial Sequence
  Artifcially synthesized peptide
REIMGTPEYL

SEQ ID NO: 1602 - protein, 9 aa, Artificial Sequence
  Artifcially synthesized peptide
REISSSPTS

SEQ ID NO: 1603 - protein, 9 aa, Artificial Sequence
  Artifcially synthesized peptide
REKSPGRML

SEQ ID NO: 1604 - protein, 9 aa, Artificial Sequence
  Artifcially synthesized peptide
REKSPLFQF

SEQ ID NO: 1605 - protein, 9 aa, Artificial Sequence
  Artifcially synthesized peptide
REKSPLFQW

SEQ ID NO: 1606 - protein, 9 aa, Artificial Sequence
  Artifcially synthesized peptide
REKSPLFQY

SEQ ID NO: 1607 - protein, 9 aa, Artificial Sequence
  Artifcially synthesized peptide
RELARKGSL

SEQ ID NO: 1608 - protein, 11 aa, Artificial Sequence
  Artifcially synthesized peptide
RELSGTIKEIL

SEQ ID NO: 1609 - protein, 9 aa, Artificial Sequence
  Artifcially synthesized peptide
RELSPLISL

SEQ ID NO: 1610 - protein, 9 aa, Artificial Sequence
  Artifcially synthesized peptide
RENSFGSPL

SEQ ID NO: 1611 - protein, 11 aa, Artificial Sequence
  Artifcially synthesized peptide
RENSFGSPLEF

SEQ ID NO: 1612 - protein, 11 aa, Artificial Sequence
  Artifcially synthesized peptide
REPSPALGPNL

SEQ ID NO: 1613 - protein, 9 aa, Artificial Sequence
  Artifcially synthesized peptide
REPSPLPEL

SEQ ID NO: 1614 - protein, 11 aa, Artificial Sequence
  Artifcially synthesized peptide
REPSPLPELAL

SEQ ID NO: 1615 - protein, 11 aa, Artificial Sequence
  Artifcially synthesized peptide
REPSPVRYDNL

SEQ ID NO: 1616 - protein, 9 aa, Artificial Sequence
  Artifcially synthesized peptide
RERSPGRLF

SEQ ID NO: 1617 - protein, 9 aa, Artificial Sequence
  Artifcially synthesized peptide
RERSPSPSF

SEQ ID NO: 1618 - protein, 9 aa, Artificial Sequence
  Artifcially synthesized peptide
RERWSFIRA

SEQ ID NO: 1619 - protein, 9 aa, Artificial Sequence
  Artifcially synthesized peptide
RESPIPIEI

SEQ ID NO: 1620 - protein, 9 aa, Artificial Sequence
  Artifcially synthesized peptide
RESPRPLQL

SEQ ID NO: 1621 - protein, 9 aa, Artificial Sequence
  Artifcially synthesized peptide
RESSPTRRL

SEQ ID NO: 1622 - protein, 10 aa, Artificial Sequence
  Artifcially synthesized peptide
RETSPNRIGL

SEQ ID NO: 1623 - protein, 9 aa, Artificial Sequence
  Artifcially synthesized peptide
REVESLPAV

SEQ ID NO: 1624 - protein, 9 aa, Artificial Sequence
  Artifcially synthesized peptide
REVSPEPIV

SEQ ID NO: 1625 - protein, 9 aa, Artificial Sequence
  Artifcially synthesized peptide
REWSPTPSL

SEQ ID NO: 1626 - protein, 10 aa, Artificial Sequence
  Artifcially synthesized peptide
REWSPTPSSL

SEQ ID NO: 1627 - protein, 9 aa, Artificial Sequence
  Artifcially synthesized peptide
REYGSPLKA

SEQ ID NO: 1628 - protein, 9 aa, Artificial Sequence
  Artifcially synthesized peptide
REYGSTSSI

SEQ ID NO: 1629 - protein, 9 aa, Artificial Sequence
  Artifcially synthesized peptide
RFKTQPVTF

SEQ ID NO: 1630 - protein, 8 aa, Artificial Sequence
  Artifcially synthesized peptide
RFSFKKSF

SEQ ID NO: 1631 - protein, 8 aa, Artificial Sequence
  Artifcially synthesized peptide
RGDGYGTF

SEQ ID NO: 1632 - protein, 9 aa, Artificial Sequence
  Artifcially synthesized peptide
RGDSPKIDL

SEQ ID NO: 1633 - protein, 9 aa, Artificial Sequence
  Artifcially synthesized peptide
RGDSRPRLV

SEQ ID NO: 1634 - protein, 8 aa, Artificial Sequence
  Artifcially synthesized peptide
RGISPIVF

SEQ ID NO: 1635 - protein, 8 aa, Artificial Sequence
  Artifcially synthesized peptide
RGSFEVTL

SEQ ID NO: 1636 - protein, 9 aa, Artificial Sequence
  Artifcially synthesized peptide
RHPKRSVSL

SEQ ID NO: 1637 - protein, 9 aa, Artificial Sequence
  Artifcially synthesized peptide
RIDISPSTL

SEQ ID NO: 1638 - protein, 11 aa, Artificial Sequence
  Artifcially synthesized peptide
RIDSKDSASEL

SEQ ID NO: 1639 - protein, 9 aa, Artificial Sequence
  Artifcially synthesized peptide
RIGSPLSPK

SEQ ID NO: 1640 - protein, 9 aa, Artificial Sequence
  Artifcially synthesized peptide
RIHGSPLQK

SEQ ID NO: 1641 - protein, 12 aa, Artificial Sequence
  Artifcially synthesized peptide
RILSATTSGIFL

SEQ ID NO: 1642 - protein, 9 aa, Artificial Sequence
  Artifcially synthesized peptide
RILSGVVTK

SEQ ID NO: 1643 - protein, 10 aa, Artificial Sequence
  Artifcially synthesized peptide
RILSGVVTKM

SEQ ID NO: 1644 - protein, 12 aa, Artificial Sequence
  Artifcially synthesized peptide
RILSGVVTKMKM

SEQ ID NO: 1645 - protein, 9 aa, Artificial Sequence
  Artifcially synthesized peptide
RILSGVVTY

SEQ ID NO: 1646 - protein, 9 aa, Artificial Sequence
  Artifcially synthesized peptide
RILSKEYNM

SEQ ID NO: 1647 - protein, 10 aa, Artificial Sequence
  Artifcially synthesized peptide
RILSPSMASK

SEQ ID NO: 1648 - protein, 10 aa, Artificial Sequence
  Artifcially synthesized peptide
RILSPSMASY

SEQ ID NO: 1649 - protein, 9 aa, Artificial Sequence
  Artifcially synthesized peptide
RINSFEEHV

SEQ ID NO: 1650 - protein, 9 aa, Artificial Sequence
  Artifcially synthesized peptide
RIPSVQINF

SEQ ID NO: 1651 - protein, 9 aa, Artificial Sequence
  Artifcially synthesized peptide
RIQSKLYRA

SEQ ID NO: 1652 - protein, 9 aa, Artificial Sequence
  Artifcially synthesized peptide
RIQYIQSRF

SEQ ID NO: 1653 - protein, 10 aa, Artificial Sequence
  Artifcially synthesized peptide
RIQYIQSRFY

SEQ ID NO: 1654 - protein, 10 aa, Artificial Sequence
  Artifcially synthesized peptide
RIRPSTPSQL

SEQ ID NO: 1655 - protein, 8 aa, Artificial Sequence
  Artifcially synthesized peptide
RISHELDS

SEQ ID NO: 1656 - protein, 9 aa, Artificial Sequence
  Artifcially synthesized peptide
RISTPLTGV

SEQ ID NO: 1657 - protein, 9 aa, Artificial Sequence
  Artifcially synthesized peptide
RITSLIVHV

SEQ ID NO: 1658 - protein, 11 aa, Artificial Sequence
  Artifcially synthesized peptide
RIVSPKNSDLK

SEQ ID NO: 1659 - protein, 7 aa, Artificial Sequence
  Artifcially synthesized peptide
RIYQYIQ

SEQ ID NO: 1660 - protein, 9 aa, Artificial Sequence
  Artifcially synthesized peptide
RIYQYIQSK

SEQ ID NO: 1661 - protein, 9 aa, Artificial Sequence
  Artifcially synthesized peptide
RIYQYIQSR

SEQ ID NO: 1662 - protein, 10 aa, Artificial Sequence
  Artifcially synthesized peptide
RIYQYIQSRF

SEQ ID NO: 1663 - protein, 11 aa, Artificial Sequence
  Artifcially synthesized peptide
RIYQYIQSRFK

SEQ ID NO: 1664 - protein, 11 aa, Artificial Sequence
  Artifcially synthesized peptide
RIYQYIQSRFY

SEQ ID NO: 1665 - protein, 10 aa, Artificial Sequence
  Artifcially synthesized peptide
RIYQYIQSRK

SEQ ID NO: 1666 - protein, 10 aa, Artificial Sequence
  Artifcially synthesized peptide
RIYQYIQSRY

SEQ ID NO: 1667 - protein, 9 aa, Artificial Sequence
  Artifcially synthesized peptide
RIYQYIQSY

SEQ ID NO: 1668 - protein, 9 aa, Artificial Sequence
  Artifcially synthesized peptide
RIYSMSLRL

SEQ ID NO: 1669 - protein, 9 aa, Artificial Sequence
  Artifcially synthesized peptide
RKASLRQFL

SEQ ID NO: 1670 - protein, 9 aa, Artificial Sequence
  Artifcially synthesized peptide
RKLRSLEQL

SEQ ID NO: 1671 - protein, 9 aa, Artificial Sequence
  Artifcially synthesized peptide
RKLSVILIK

SEQ ID NO: 1672 - protein, 9 aa, Artificial Sequence
  Artifcially synthesized peptide
RKLSVILIL

SEQ ID NO: 1673 - protein, 9 aa, Artificial Sequence
  Artifcially synthesized peptide
RKNSFVMEY

SEQ ID NO: 1674 - protein, 10 aa, Artificial Sequence
  Artifcially synthesized peptide
RKPSAEMNRI

SEQ ID NO: 1675 - protein, 9 aa, Artificial Sequence
  Artifcially synthesized peptide
RKPSIVTKY

SEQ ID NO: 1676 - protein, 9 aa, Artificial Sequence
  Artifcially synthesized peptide
RKPSLAKAL

SEQ ID NO: 1677 - protein, 9 aa, Artificial Sequence
  Artifcially synthesized peptide
RKSSIIIRM

SEQ ID NO: 1678 - protein, 9 aa, Artificial Sequence
  Artifcially synthesized peptide
RLSSVSVTY

SEQ ID NO: 1679 - protein, 9 aa, Artificial Sequence
  Artifcially synthesized peptide
RLASASRAL

SEQ ID NO: 1680 - protein, 9 aa, Artificial Sequence
  Artifcially synthesized peptide
RLASFAVRK

SEQ ID NO: 1681 - protein, 9 aa, Artificial Sequence
  Artifcially synthesized peptide
RLASFAVRY

SEQ ID NO: 1682 - protein, 10 aa, Artificial Sequence
  Artifcially synthesized peptide
RLASIELPSM

SEQ ID NO: 1683 - protein, 12 aa, Artificial Sequence
  Artifcially synthesized peptide
RLASIELPSMAV

SEQ ID NO: 1684 - protein, 10 aa, Artificial Sequence
  Artifcially synthesized peptide
RLASIELPSV

SEQ ID NO: 1685 - protein, 10 aa, Artificial Sequence
  Artifcially synthesized peptide
RLASLMNLGM

SEQ ID NO: 1686 - protein, 10 aa, Artificial Sequence
  Artifcially synthesized peptide
RLASLNAEAL

SEQ ID NO: 1687 - protein, 10 aa, Artificial Sequence
  Artifcially synthesized peptide
RLASLNAEAV

SEQ ID NO: 1688 - protein, 9 aa, Artificial Sequence
  Artifcially synthesized peptide
RLASLQSEV

SEQ ID NO: 1689 - protein, 9 aa, Artificial Sequence
  Artifcially synthesized peptide
RLASLSISV

SEQ ID NO: 1690 - protein, 9 aa, Artificial Sequence
  Artifcially synthesized peptide
RLASPLVHK

SEQ ID NO: 1691 - protein, 9 aa, Artificial Sequence
  Artifcially synthesized peptide
RLASPLVHY

SEQ ID NO: 1692 - protein, 10 aa, Artificial Sequence
  Artifcially synthesized peptide
RLASPPPPPK

SEQ ID NO: 1693 - protein, 10 aa, Artificial Sequence
  Artifcially synthesized peptide
RLASPPPPPY

SEQ ID NO: 1694 - protein, 9 aa, Artificial Sequence
  Artifcially synthesized peptide
RLASPTSGV

SEQ ID NO: 1695 - protein, 10 aa, Artificial Sequence
  Artifcially synthesized peptide
RLASPTSGVK

SEQ ID NO: 1696 - protein, 11 aa, Artificial Sequence
  Artifcially synthesized peptide
RLASPTSGVKK

SEQ ID NO: 1697 - protein, 11 aa, Artificial Sequence
  Artifcially synthesized peptide
RLASPTSGVKR

SEQ ID NO: 1698 - protein, 11 aa, Artificial Sequence
  Artifcially synthesized peptide
RLASPTSGVKY

SEQ ID NO: 1699 - protein, 9 aa, Artificial Sequence
  Artifcially synthesized peptide
RLASRPLLL

SEQ ID NO: 1700 - protein, 11 aa, Artificial Sequence
  Artifcially synthesized peptide
RLASSATQVHK

SEQ ID NO: 1701 - protein, 9 aa, Artificial Sequence
  Artifcially synthesized peptide
RLASSVLRC

SEQ ID NO: 1702 - protein, 10 aa, Artificial Sequence
  Artifcially synthesized peptide
RLASSVLRCG

SEQ ID NO: 1703 - protein, 9 aa, Artificial Sequence
  Artifcially synthesized peptide
RLASYLDKV

SEQ ID NO: 1704 - protein, 9 aa, Artificial Sequence
  Artifcially synthesized peptide
RLASYLDRV

SEQ ID NO: 1705 - protein, 9 aa, Artificial Sequence
  Artifcially synthesized peptide
RLASYLSGC

SEQ ID NO: 1706 - protein, 9 aa, Artificial Sequence
  Artifcially synthesized peptide
RLASYLSGC

SEQ ID NO: 1707 - protein, 10 aa, Artificial Sequence
  Artifcially synthesized peptide
RLDSIVGPQL

SEQ ID NO: 1708 - protein, 10 aa, Artificial Sequence
  Artifcially synthesized peptide
RLDSPLSNRY

SEQ ID NO: 1709 - protein, 11 aa, Artificial Sequence
  Artifcially synthesized peptide
RLDSTPGKVFL

SEQ ID NO: 1710 - protein, 11 aa, Artificial Sequence
  Artifcially synthesized peptide
RLDSTPGKVFV

SEQ ID NO: 1711 - protein, 9 aa, Artificial Sequence
  Artifcially synthesized peptide
RLDSYLRAP

SEQ ID NO: 1712 - protein, 7 aa, Artificial Sequence
  Artifcially synthesized peptide
RLDSYVR

SEQ ID NO: 1713 - protein, 7 aa, Artificial Sequence
  Artifcially synthesized peptide
RLDSYVR

SEQ ID NO: 1714 - protein, 8 aa, Artificial Sequence
  Artifcially synthesized peptide
RLDSYVRS

SEQ ID NO: 1715 - protein, 9 aa, Artificial Sequence
  Artifcially synthesized peptide
RLDSYVRSL

SEQ ID NO: 1716 - protein, 9 aa, Artificial Sequence
  Artifcially synthesized peptide
RLDSYVRSL

SEQ ID NO: 1717 - protein, 9 aa, Artificial Sequence
  Artifcially synthesized peptide
RLDSYVRSV

SEQ ID NO: 1718 - protein, 9 aa, Artificial Sequence
  Artifcially synthesized peptide
RLDTGPQSL

SEQ ID NO: 1719 - protein, 9 aa, Artificial Sequence
  Artifcially synthesized peptide
RLESANRRL

SEQ ID NO: 1720 - protein, 9 aa, Artificial Sequence
  Artifcially synthesized peptide
RLESLSYQL

SEQ ID NO: 1721 - protein, 10 aa, Artificial Sequence
  Artifcially synthesized peptide
RLFSFSKTPK

SEQ ID NO: 1722 - protein, 11 aa, Artificial Sequence
  Artifcially synthesized peptide
RLFSHPREPAL

SEQ ID NO: 1723 - protein, 7 aa, Artificial Sequence
  Artifcially synthesized peptide
RLFSKEL

SEQ ID NO: 1724 - protein, 8 aa, Artificial Sequence
  Artifcially synthesized peptide
RLFSKELR

SEQ ID NO: 1725 - protein, 9 aa, Artificial Sequence
  Artifcially synthesized peptide
RLFSKELRC

SEQ ID NO: 1726 - protein, 9 aa, Artificial Sequence
  Artifcially synthesized peptide
RLFSKELRC

SEQ ID NO: 1727 - protein, 9 aa, Artificial Sequence
  Artifcially synthesized peptide
RLFSKELRV

SEQ ID NO: 1728 - protein, 10 aa, Artificial Sequence
  Artifcially synthesized peptide
RLFSLSNPSL

SEQ ID NO: 1729 - protein, 9 aa, Artificial Sequence
  Artifcially synthesized peptide
RLFSPTYGL

SEQ ID NO: 1730 - protein, 9 aa, Artificial Sequence
  Artifcially synthesized peptide
RLFSQGQDV

SEQ ID NO: 1731 - protein, 9 aa, Artificial Sequence
  Artifcially synthesized peptide
RLFVGSIPK

SEQ ID NO: 1732 - protein, 9 aa, Artificial Sequence
  Artifcially synthesized peptide
RLGSFHELL

SEQ ID NO: 1733 - protein, 10 aa, Artificial Sequence
  Artifcially synthesized peptide
RLGSFHELLL

SEQ ID NO: 1734 - protein, 9 aa, Artificial Sequence
  Artifcially synthesized peptide
RLISFKAEV

SEQ ID NO: 1735 - protein, 9 aa, Artificial Sequence
  Artifcially synthesized peptide
RLISPYKKK

SEQ ID NO: 1736 - protein, 9 aa, Artificial Sequence
  Artifcially synthesized peptide
RLISQDVKL

SEQ ID NO: 1737 - protein, 9 aa, Artificial Sequence
  Artifcially synthesized peptide
RLISQIVSS

SEQ ID NO: 1738 - protein, 10 aa, Artificial Sequence
  Artifcially synthesized peptide
RLISQIVSSI

SEQ ID NO: 1739 - protein, 12 aa, Artificial Sequence
  Artifcially synthesized peptide
RLISQIVSSITA

SEQ ID NO: 1740 - protein, 9 aa, Artificial Sequence
  Artifcially synthesized peptide
RLKLPSGSK

SEQ ID NO: 1741 - protein, 10 aa, Artificial Sequence
  Artifcially synthesized peptide
RLKLPSGSKK

SEQ ID NO: 1742 - protein, 10 aa, Artificial Sequence
  Artifcially synthesized peptide
RLKLPSGSKY

SEQ ID NO: 1743 - protein, 11 aa, Artificial Sequence
  Artifcially synthesized peptide
RLKSDERPVHI

SEQ ID NO: 1744 - protein, 12 aa, Artificial Sequence
  Artifcially synthesized peptide
RLKSIEERQLLK

SEQ ID NO: 1745 - protein, 9 aa, Artificial Sequence
  Artifcially synthesized peptide
RLKSIIQEV

SEQ ID NO: 1746 - protein, 9 aa, Artificial Sequence
  Artifcially synthesized peptide
RLKSPFRKK

SEQ ID NO: 1747 - protein, 11 aa, Artificial Sequence
  Artifcially synthesized peptide
RLKSPGSGHVK

SEQ ID NO: 1748 - protein, 9 aa, Artificial Sequence
  Artifcially synthesized peptide
RLKSPISLK

SEQ ID NO: 1749 - protein, 9 aa, Artificial Sequence
  Artifcially synthesized peptide
RLKSPISLY

SEQ ID NO: 1750 - protein, 11 aa, Artificial Sequence
  Artifcially synthesized peptide
RLKSPSPKSEK

SEQ ID NO: 1751 - protein, 11 aa, Artificial Sequence
  Artifcially synthesized peptide
RLKSPSPKSER

SEQ ID NO: 1752 - protein, 11 aa, Artificial Sequence
  Artifcially synthesized peptide
RLKTPTSQSYK

SEQ ID NO: 1753 - protein, 11 aa, Artificial Sequence
  Artifcially synthesized peptide
RLKTPTSQSYR

SEQ ID NO: 1754 - protein, 9 aa, Artificial Sequence
  Artifcially synthesized peptide
RLKTTPLRK

SEQ ID NO: 1755 - protein, 9 aa, Artificial Sequence
  Artifcially synthesized peptide
RLKTTPLRR

SEQ ID NO: 1756 - protein, 11 aa, Artificial Sequence
  Artifcially synthesized peptide
RLLDPSSPLAL

SEQ ID NO: 1757 - protein, 12 aa, Artificial Sequence
  Artifcially synthesized peptide
RLLDRSPSRSAK

SEQ ID NO: 1758 - protein, 12 aa, Artificial Sequence
  Artifcially synthesized peptide
RLLDRSPSRSAY

SEQ ID NO: 1759 - protein, 8 aa, Artificial Sequence
  Artifcially synthesized peptide
RLLSAAEN

SEQ ID NO: 1760 - protein, 10 aa, Artificial Sequence
  Artifcially synthesized peptide
RLLSAAENFL

SEQ ID NO: 1761 - protein, 10 aa, Artificial Sequence
  Artifcially synthesized peptide
RLLSDGQQHL

SEQ ID NO: 1762 - protein, 9 aa, Artificial Sequence
  Artifcially synthesized peptide
RLLSDLEEL

SEQ ID NO: 1763 - protein, 9 aa, Artificial Sequence
  Artifcially synthesized peptide
RLLSDQTRL

SEQ ID NO: 1764 - protein, 9 aa, Artificial Sequence
  Artifcially synthesized peptide
RLLSFQRYL

SEQ ID NO: 1765 - protein, 9 aa, Artificial Sequence
  Artifcially synthesized peptide
RLLSGVVTK

SEQ ID NO: 1766 - protein, 9 aa, Artificial Sequence
  Artifcially synthesized peptide
RLLSGVVTY

SEQ ID NO: 1767 - protein, 9 aa, Artificial Sequence
  Artifcially synthesized peptide
RLLSHISEA

SEQ ID NO: 1768 - protein, 9 aa, Artificial Sequence
  Artifcially synthesized peptide
RLLSHISEV

SEQ ID NO: 1769 - protein, 9 aa, Artificial Sequence
  Artifcially synthesized peptide
RLLSPLSSA

SEQ ID NO: 1770 - protein, 9 aa, Artificial Sequence
  Artifcially synthesized peptide
RLLSPLSSA

SEQ ID NO: 1771 - protein, 11 aa, Artificial Sequence
  Artifcially synthesized peptide
RLLSPLSSARL

SEQ ID NO: 1772 - protein, 9 aa, Artificial Sequence
  Artifcially synthesized peptide
RLLSPLSSV

SEQ ID NO: 1773 - protein, 10 aa, Artificial Sequence
  Artifcially synthesized peptide
RLLSPPLRPR

SEQ ID NO: 1774 - protein, 10 aa, Artificial Sequence
  Artifcially synthesized peptide
RLLSPQQPAL

SEQ ID NO: 1775 - protein, 9 aa, Artificial Sequence
  Artifcially synthesized peptide
RLLSPRPSL

SEQ ID NO: 1776 - protein, 10 aa, Artificial Sequence
  Artifcially synthesized peptide
RLLSPRPSLL

SEQ ID NO: 1777 - protein, 10 aa, Artificial Sequence
  Artifcially synthesized peptide
RLLSPSMASK

SEQ ID NO: 1778 - protein, 10 aa, Artificial Sequence
  Artifcially synthesized peptide
RLLSSGVSEI

SEQ ID NO: 1779 - protein, 10 aa, Artificial Sequence
  Artifcially synthesized peptide
RLLSSGVSEV

SEQ ID NO: 1780 - protein, 10 aa, Artificial Sequence
  Artifcially synthesized peptide
RLLSTDAEAV

SEQ ID NO: 1781 - protein, 10 aa, Artificial Sequence
  Artifcially synthesized peptide
RLLSVEGSTL

SEQ ID NO: 1782 - protein, 9 aa, Artificial Sequence
  Artifcially synthesized peptide
RLLSVEIVK

SEQ ID NO: 1783 - protein, 9 aa, Artificial Sequence
  Artifcially synthesized peptide
RLLSVEIVY

SEQ ID NO: 1784 - protein, 10 aa, Artificial Sequence
  Artifcially synthesized peptide
RLLSVHDFDF

SEQ ID NO: 1785 - protein, 9 aa, Artificial Sequence
  Artifcially synthesized peptide
RLLSVILIK

SEQ ID NO: 1786 - protein, 9 aa, Artificial Sequence
  Artifcially synthesized peptide
RLLSVNIRV

SEQ ID NO: 1787 - protein, 9 aa, Artificial Sequence
  Artifcially synthesized peptide
RLLSWSDNW

SEQ ID NO: 1788 - protein, 9 aa, Artificial Sequence
  Artifcially synthesized peptide
RLMSGKVKV

SEQ ID NO: 1789 - protein, 9 aa, Artificial Sequence
  Artifcially synthesized peptide
RLMSMPVAK

SEQ ID NO: 1790 - protein, 9 aa, Artificial Sequence
  Artifcially synthesized peptide
RLMSMPVAY

SEQ ID NO: 1791 - protein, 10 aa, Artificial Sequence
  Artifcially synthesized peptide
RLMTPKPVSI

SEQ ID NO: 1792 - protein, 10 aa, Artificial Sequence
  Artifcially synthesized peptide
RLMTPTLSFL

SEQ ID NO: 1793 - protein, 10 aa, Artificial Sequence
  Artifcially synthesized peptide
RLNTSDFQKL

SEQ ID NO: 1794 - protein, 9 aa, Artificial Sequence
  Artifcially synthesized peptide
RLPNRIPSL

SEQ ID NO: 1795 - protein, 10 aa, Artificial Sequence
  Artifcially synthesized peptide
RLPSFLKKNK

SEQ ID NO: 1796 - protein, 9 aa, Artificial Sequence
  Artifcially synthesized peptide
RLPSLVHGY

SEQ ID NO: 1797 - protein, 9 aa, Artificial Sequence
  Artifcially synthesized peptide
RLPSPTSPF

SEQ ID NO: 1798 - protein, 9 aa, Artificial Sequence
  Artifcially synthesized peptide
RLPSSTLKK

SEQ ID NO: 1799 - protein, 9 aa, Artificial Sequence
  Artifcially synthesized peptide
RLPSSTLKR

SEQ ID NO: 1800 - protein, 9 aa, Artificial Sequence
  Artifcially synthesized peptide
RLPSSTLKY

SEQ ID NO: 1801 - protein, 9 aa, Artificial Sequence
  Artifcially synthesized peptide
RLPTRLPEI

SEQ ID NO: 1802 - protein, 9 aa, Artificial Sequence
  Artifcially synthesized peptide
RLQSLIKNI

SEQ ID NO: 1803 - protein, 9 aa, Artificial Sequence
  Artifcially synthesized peptide
RLQSTSERL

SEQ ID NO: 1804 - protein, 9 aa, Artificial Sequence
  Artifcially synthesized peptide
RLQSTSERV

SEQ ID NO: 1805 - protein, 9 aa, Artificial Sequence
  Artifcially synthesized peptide
RLQTQVFKL

SEQ ID NO: 1806 - protein, 10 aa, Artificial Sequence
  Artifcially synthesized peptide
RLRQSPLATK

SEQ ID NO: 1807 - protein, 10 aa, Artificial Sequence
  Artifcially synthesized peptide
RLRQSPLATR

SEQ ID NO: 1808 - protein, 10 aa, Artificial Sequence
  Artifcially synthesized peptide
RLRQSPLATY

SEQ ID NO: 1809 - protein, 9 aa, Artificial Sequence
  Artifcially synthesized peptide
RLRRSPLLK

SEQ ID NO: 1810 - protein, 10 aa, Artificial Sequence
  Artifcially synthesized peptide
RLRSAGAAQK

SEQ ID NO: 1811 - protein, 11 aa, Artificial Sequence
  Artifcially synthesized peptide
RLRSLSSLREK

SEQ ID NO: 1812 - protein, 12 aa, Artificial Sequence
  Artifcially synthesized peptide
RLRSLSSPTVTL

SEQ ID NO: 1813 - protein, 12 aa, Artificial Sequence
  Artifcially synthesized peptide
RLRSLSSPTVTV

SEQ ID NO: 1814 - protein, 10 aa, Artificial Sequence
  Artifcially synthesized peptide
RLRSPPPVSK

SEQ ID NO: 1815 - protein, 9 aa, Artificial Sequence
  Artifcially synthesized peptide
RLRSSLVFK

SEQ ID NO: 1816 - protein, 9 aa, Artificial Sequence
  Artifcially synthesized peptide
RLRSSVPGV

SEQ ID NO: 1817 - protein, 9 aa, Artificial Sequence
  Artifcially synthesized peptide
RLRSSVPGV

SEQ ID NO: 1818 - protein, 9 aa, Artificial Sequence
  Artifcially synthesized peptide
RLRSSVPGV

SEQ ID NO: 1819 - protein, 9 aa, Artificial Sequence
  Artifcially synthesized peptide
RLRSYEDMI

SEQ ID NO: 1820 - protein, 10 aa, Artificial Sequence
  Artifcially synthesized peptide
RLRTSPITRK

SEQ ID NO: 1821 - protein, 10 aa, Artificial Sequence
  Artifcially synthesized peptide
RLRTSPITRR

SEQ ID NO: 1822 - protein, 9 aa, Artificial Sequence
  Artifcially synthesized peptide
RLSDTPPLL

SEQ ID NO: 1823 - protein, 8 aa, Artificial Sequence
  Artifcially synthesized peptide
RLSFLVSY

SEQ ID NO: 1824 - protein, 9 aa, Artificial Sequence
  Artifcially synthesized peptide
RLSPVPVPR

SEQ ID NO: 1825 - protein, 9 aa, Artificial Sequence
  Artifcially synthesized peptide
RLSSLIRHK

SEQ ID NO: 1826 - protein, 11 aa, Artificial Sequence
  Artifcially synthesized peptide
RLSSLRASTSK

SEQ ID NO: 1827 - protein, 9 aa, Artificial Sequence
  Artifcially synthesized peptide
RLSSPISKK

SEQ ID NO: 1828 - protein, 9 aa, Artificial Sequence
  Artifcially synthesized peptide
RLSSPISKR

SEQ ID NO: 1829 - protein, 9 aa, Artificial Sequence
  Artifcially synthesized peptide
RLSSPISKY

SEQ ID NO: 1830 - protein, 9 aa, Artificial Sequence
  Artifcially synthesized peptide
RLSSPLHFV

SEQ ID NO: 1831 - protein, 9 aa, Artificial Sequence
  Artifcially synthesized peptide
RLSSPVLHK

SEQ ID NO: 1832 - protein, 9 aa, Artificial Sequence
  Artifcially synthesized peptide
RLSSPVLHR

SEQ ID NO: 1833 - protein, 9 aa, Artificial Sequence
  Artifcially synthesized peptide
RLSSPVLHY

SEQ ID NO: 1834 - protein, 9 aa, Artificial Sequence
  Artifcially synthesized peptide
RLSSRFSSK

SEQ ID NO: 1835 - protein, 9 aa, Artificial Sequence
  Artifcially synthesized peptide
RLSSRFSSR

SEQ ID NO: 1836 - protein, 9 aa, Artificial Sequence
  Artifcially synthesized peptide
RLSSRFSSY

SEQ ID NO: 1837 - protein, 9 aa, Artificial Sequence
  Artifcially synthesized peptide
RLSSRYSQK

SEQ ID NO: 1838 - protein, 9 aa, Artificial Sequence
  Artifcially synthesized peptide
RLSSRYSQY

SEQ ID NO: 1839 - protein, 10 aa, Artificial Sequence
  Artifcially synthesized peptide
RLSSVKLISK

SEQ ID NO: 1840 - protein, 10 aa, Artificial Sequence
  Artifcially synthesized peptide
RLSSVKLISY

SEQ ID NO: 1841 - protein, 10 aa, Artificial Sequence
  Artifcially synthesized peptide
RLTFSPTYGV

SEQ ID NO: 1842 - protein, 9 aa, Artificial Sequence
  Artifcially synthesized peptide
RLVSLSMRK

SEQ ID NO: 1843 - protein, 9 aa, Artificial Sequence
  Artifcially synthesized peptide
RLVSLSMRY

SEQ ID NO: 1844 - protein, 9 aa, Artificial Sequence
  Artifcially synthesized peptide
RLYKSEPEL

SEQ ID NO: 1845 - protein, 9 aa, Artificial Sequence
  Artifcially synthesized peptide
RLYKSPLRH

SEQ ID NO: 1846 - protein, 9 aa, Artificial Sequence
  Artifcially synthesized peptide
RLYKSPLRK

SEQ ID NO: 1847 - protein, 9 aa, Artificial Sequence
  Artifcially synthesized peptide
RLYQYIQSK

SEQ ID NO: 1848 - protein, 9 aa, Artificial Sequence
  Artifcially synthesized peptide
RLYQYIQSR

SEQ ID NO: 1849 - protein, 11 aa, Artificial Sequence
  Artifcially synthesized peptide
RLYQYIQSRFK

SEQ ID NO: 1850 - protein, 9 aa, Artificial Sequence
  Artifcially synthesized peptide
RLYQYIQSY

SEQ ID NO: 1851 - protein, 10 aa, Artificial Sequence
  Artifcially synthesized peptide
RLYQYLQSRF

SEQ ID NO: 1852 - protein, 11 aa, Artificial Sequence
  Artifcially synthesized peptide
RLYQYLQSRFK

SEQ ID NO: 1853 - protein, 11 aa, Artificial Sequence
  Artifcially synthesized peptide
RLYQYLQSRFY

SEQ ID NO: 1854 - protein, 10 aa, Artificial Sequence
  Artifcially synthesized peptide
RLYQYLQSRK

SEQ ID NO: 1855 - protein, 10 aa, Artificial Sequence
  Artifcially synthesized peptide
RLYSGPMNKV

SEQ ID NO: 1856 - protein, 9 aa, Artificial Sequence
  Artifcially synthesized peptide
RLYSGSRSK

SEQ ID NO: 1857 - protein, 9 aa, Artificial Sequence
  Artifcially synthesized peptide
RLYSGSRSR

SEQ ID NO: 1858 - protein, 9 aa, Artificial Sequence
  Artifcially synthesized peptide
RLYSGSRSY

SEQ ID NO: 1859 - protein, 9 aa, Artificial Sequence
  Artifcially synthesized peptide
RLYSKSRDK

SEQ ID NO: 1860 - protein, 10 aa, Artificial Sequence
  Artifcially synthesized peptide
RLYSPDHRQK

SEQ ID NO: 1861 - protein, 9 aa, Artificial Sequence
  Artifcially synthesized peptide
RLYSPERSK

SEQ ID NO: 1862 - protein, 9 aa, Artificial Sequence
  Artifcially synthesized peptide
RLYSPYNHK

SEQ ID NO: 1863 - protein, 9 aa, Artificial Sequence
  Artifcially synthesized peptide
RLYSPYNHR

SEQ ID NO: 1864 - protein, 9 aa, Artificial Sequence
  Artifcially synthesized peptide
RLYSPYNHY

SEQ ID NO: 1865 - protein, 9 aa, Artificial Sequence
  Artifcially synthesized peptide
RLYSRSFSK

SEQ ID NO: 1866 - protein, 9 aa, Artificial Sequence
  Artifcially synthesized peptide
RLYSRSFSY

SEQ ID NO: 1867 - protein, 9 aa, Artificial Sequence
  Artifcially synthesized peptide
RLYSYPRQK

SEQ ID NO: 1868 - protein, 14 aa, Artificial Sequence
  Artifcially synthesized peptide
RLYVTTSTRTYSLG

SEQ ID NO: 1869 - protein, 14 aa, Artificial Sequence
  Artifcially synthesized peptide
RLYVTTSTRTYSLK

SEQ ID NO: 1870 - protein, 14 aa, Artificial Sequence
  Artifcially synthesized peptide
RLYVTTSTRTYSLY

SEQ ID NO: 1871 - protein, 10 aa, Artificial Sequence
  Artifcially synthesized peptide
RMASPPPPPK

SEQ ID NO: 1872 - protein, 9 aa, Artificial Sequence
  Artifcially synthesized peptide
RMASPTSGV

SEQ ID NO: 1873 - protein, 10 aa, Artificial Sequence
  Artifcially synthesized peptide
RMASPTSGVK

SEQ ID NO: 1874 - protein, 11 aa, Artificial Sequence
  Artifcially synthesized peptide
RMASPTSGVKK

SEQ ID NO: 1875 - protein, 11 aa, Artificial Sequence
  Artifcially synthesized peptide
RMASPTSGVKR

SEQ ID NO: 1876 - protein, 11 aa, Artificial Sequence
  Artifcially synthesized peptide
RMASPTSGVKY

SEQ ID NO: 1877 - protein, 11 aa, Artificial Sequence
  Artifcially synthesized peptide
RMASSATQVHK

SEQ ID NO: 1878 - protein, 11 aa, Artificial Sequence
  Artifcially synthesized peptide
RMDSTPGKVFL

SEQ ID NO: 1879 - protein, 11 aa, Artificial Sequence
  Artifcially synthesized peptide
RMDSTPGKVFV

SEQ ID NO: 1880 - protein, 9 aa, Artificial Sequence
  Artifcially synthesized peptide
RMDSYVRSL

SEQ ID NO: 1881 - protein, 9 aa, Artificial Sequence
  Artifcially synthesized peptide
RMDSYVRSV

SEQ ID NO: 1882 - protein, 9 aa, Artificial Sequence
  Artifcially synthesized peptide
RMFPTPPSL

SEQ ID NO: 1883 - protein, 10 aa, Artificial Sequence
  Artifcially synthesized peptide
RMFSFSKTPK

SEQ ID NO: 1884 - protein, 9 aa, Artificial Sequence
  Artifcially synthesized peptide
RMFSKELRC

SEQ ID NO: 1885 - protein, 9 aa, Artificial Sequence
  Artifcially synthesized peptide
RMFSKELRV

SEQ ID NO: 1886 - protein, 9 aa, Artificial Sequence
  Artifcially synthesized peptide
RMFSPMEEK

SEQ ID NO: 1887 - protein, 12 aa, Artificial Sequence
  Artifcially synthesized peptide
RMFSPMEEKELL

SEQ ID NO: 1888 - protein, 9 aa, Artificial Sequence
  Artifcially synthesized peptide
RMFSPTYGL

SEQ ID NO: 1889 - protein, 9 aa, Artificial Sequence
  Artifcially synthesized peptide
RMFSPTYGV

SEQ ID NO: 1890 - protein, 10 aa, Artificial Sequence
  Artifcially synthesized peptide
RMISKLEAQV

SEQ ID NO: 1891 - protein, 9 aa, Artificial Sequence
  Artifcially synthesized peptide
RMISPYKKK

SEQ ID NO: 1892 - protein, 9 aa, Artificial Sequence
  Artifcially synthesized peptide
RMISQDVKL

SEQ ID NO: 1893 - protein, 9 aa, Artificial Sequence
  Artifcially synthesized peptide
RMISQDVKV

SEQ ID NO: 1894 - protein, 9 aa, Artificial Sequence
  Artifcially synthesized peptide
RMISTGSEL

SEQ ID NO: 1895 - protein, 9 aa, Artificial Sequence
  Artifcially synthesized peptide
RMKLPSGSK

SEQ ID NO: 1896 - protein, 10 aa, Artificial Sequence
  Artifcially synthesized peptide
RMKLPSGSKK

SEQ ID NO: 1897 - protein, 10 aa, Artificial Sequence
  Artifcially synthesized peptide
RMKLPSGSKY

SEQ ID NO: 1898 - protein, 9 aa, Artificial Sequence
  Artifcially synthesized peptide
RMKSPFRKK

SEQ ID NO: 1899 - protein, 11 aa, Artificial Sequence
  Artifcially synthesized peptide
RMKSPGSGHVK

SEQ ID NO: 1900 - protein, 11 aa, Artificial Sequence
  Artifcially synthesized peptide
RMKSPSPKSEK

SEQ ID NO: 1901 - protein, 11 aa, Artificial Sequence
  Artifcially synthesized peptide
RMKSPSPKSER

SEQ ID NO: 1902 - protein, 11 aa, Artificial Sequence
  Artifcially synthesized peptide
RMKTPTSQSYK

SEQ ID NO: 1903 - protein, 11 aa, Artificial Sequence
  Artifcially synthesized peptide
RMKTPTSQSYR

SEQ ID NO: 1904 - protein, 9 aa, Artificial Sequence
  Artifcially synthesized peptide
RMKTTPLRK

SEQ ID NO: 1905 - protein, 9 aa, Artificial Sequence
  Artifcially synthesized peptide
RMKTTPLRR

SEQ ID NO: 1906 - protein, 12 aa, Artificial Sequence
  Artifcially synthesized peptide
RMLDRSPSRSAK

SEQ ID NO: 1907 - protein, 12 aa, Artificial Sequence
  Artifcially synthesized peptide
RMLDRSPSRSAY

SEQ ID NO: 1908 - protein, 9 aa, Artificial Sequence
  Artifcially synthesized peptide
RMLSHISEA

SEQ ID NO: 1909 - protein, 9 aa, Artificial Sequence
  Artifcially synthesized peptide
RMLSHISEV

SEQ ID NO: 1910 - protein, 10 aa, Artificial Sequence
  Artifcially synthesized peptide
RMLSLRDQRL

SEQ ID NO: 1911 - protein, 9 aa, Artificial Sequence
  Artifcially synthesized peptide
RMLSPLSSA

SEQ ID NO: 1912 - protein, 9 aa, Artificial Sequence
  Artifcially synthesized peptide
RMLSPLSSV

SEQ ID NO: 1913 - protein, 10 aa, Artificial Sequence
  Artifcially synthesized peptide
RMLSPSMASK

SEQ ID NO: 1914 - protein, 10 aa, Artificial Sequence
  Artifcially synthesized peptide
RMLSSGVSEI

SEQ ID NO: 1915 - protein, 10 aa, Artificial Sequence
  Artifcially synthesized peptide
RMLSSGVSEV

SEQ ID NO: 1916 - protein, 9 aa, Artificial Sequence
  Artifcially synthesized peptide
RMLSVILIK

SEQ ID NO: 1917 - protein, 10 aa, Artificial Sequence
  Artifcially synthesized peptide
RMPSFLKKNK

SEQ ID NO: 1918 - protein, 9 aa, Artificial Sequence
  Artifcially synthesized peptide
RMPSSTLKK

SEQ ID NO: 1919 - protein, 9 aa, Artificial Sequence
  Artifcially synthesized peptide
RMPSSTLKR

SEQ ID NO: 1920 - protein, 9 aa, Artificial Sequence
  Artifcially synthesized peptide
RMQSTSERL

SEQ ID NO: 1921 - protein, 9 aa, Artificial Sequence
  Artifcially synthesized peptide
RMQSTSERV

SEQ ID NO: 1922 - protein, 10 aa, Artificial Sequence
  Artifcially synthesized peptide
RMRQSPLATK

SEQ ID NO: 1923 - protein, 10 aa, Artificial Sequence
  Artifcially synthesized peptide
RMRQSPLATR

SEQ ID NO: 1924 - protein, 9 aa, Artificial Sequence
  Artifcially synthesized peptide
RMRRSPLLK

SEQ ID NO: 1925 - protein, 10 aa, Artificial Sequence
  Artifcially synthesized peptide
RMRSAGAAQK

SEQ ID NO: 1926 - protein, 11 aa, Artificial Sequence
  Artifcially synthesized peptide
RMRSLSSLREK

SEQ ID NO: 1927 - protein, 10 aa, Artificial Sequence
  Artifcially synthesized peptide
RMRSPPPVSK

SEQ ID NO: 1928 - protein, 10 aa, Artificial Sequence
  Artifcially synthesized peptide
RMRTSPITRK

SEQ ID NO: 1929 - protein, 10 aa, Artificial Sequence
  Artifcially synthesized peptide
RMRTSPITRR

SEQ ID NO: 1930 - protein, 8 aa, Artificial Sequence
  Artifcially synthesized peptide
RMSLLSVV

SEQ ID NO: 1931 - protein, 9 aa, Artificial Sequence
  Artifcially synthesized peptide
RMSSLIRHK

SEQ ID NO: 1932 - protein, 9 aa, Artificial Sequence
  Artifcially synthesized peptide
RMSSPISKK

SEQ ID NO: 1933 - protein, 9 aa, Artificial Sequence
  Artifcially synthesized peptide
RMSSPISKR

SEQ ID NO: 1934 - protein, 9 aa, Artificial Sequence
  Artifcially synthesized peptide
RMSSPLHFV

SEQ ID NO: 1935 - protein, 9 aa, Artificial Sequence
  Artifcially synthesized peptide
RMSSPVLHK

SEQ ID NO: 1936 - protein, 9 aa, Artificial Sequence
  Artifcially synthesized peptide
RMSSRYSQK

SEQ ID NO: 1937 - protein, 10 aa, Artificial Sequence
  Artifcially synthesized peptide
RMSSVKLISK

SEQ ID NO: 1938 - protein, 10 aa, Artificial Sequence
  Artifcially synthesized peptide
RMSSVKLISY

SEQ ID NO: 1939 - protein, 9 aa, Artificial Sequence
  Artifcially synthesized peptide
RMVSLSMRK

SEQ ID NO: 1940 - protein, 9 aa, Artificial Sequence
  Artifcially synthesized peptide
RMVSLSMRY

SEQ ID NO: 1941 - protein, 9 aa, Artificial Sequence
  Artifcially synthesized peptide
RMYKSPLRH

SEQ ID NO: 1942 - protein, 9 aa, Artificial Sequence
  Artifcially synthesized peptide
RMYKSPLRK

SEQ ID NO: 1943 - protein, 9 aa, Artificial Sequence
  Artifcially synthesized peptide
RMYQYIQSK

SEQ ID NO: 1944 - protein, 9 aa, Artificial Sequence
  Artifcially synthesized peptide
RMYQYIQSR

SEQ ID NO: 1945 - protein, 10 aa, Artificial Sequence
  Artifcially synthesized peptide
RMYQYLQSRF

SEQ ID NO: 1946 - protein, 11 aa, Artificial Sequence
  Artifcially synthesized peptide
RMYQYLQSRFK

SEQ ID NO: 1947 - protein, 10 aa, Artificial Sequence
  Artifcially synthesized peptide
RMYQYLQSRK

SEQ ID NO: 1948 - protein, 9 aa, Artificial Sequence
  Artifcially synthesized peptide
RMYSFDDVL

SEQ ID NO: 1949 - protein, 9 aa, Artificial Sequence
  Artifcially synthesized peptide
RMYSGSRSK

SEQ ID NO: 1950 - protein, 9 aa, Artificial Sequence
  Artifcially synthesized peptide
RMYSGSRSR

SEQ ID NO: 1951 - protein, 9 aa, Artificial Sequence
  Artifcially synthesized peptide
RMYSKSRDH

SEQ ID NO: 1952 - protein, 9 aa, Artificial Sequence
  Artifcially synthesized peptide
RMYSKSRDK

SEQ ID NO: 1953 - protein, 9 aa, Artificial Sequence
  Artifcially synthesized peptide
RMYSKSRDY

SEQ ID NO: 1954 - protein, 10 aa, Artificial Sequence
  Artifcially synthesized peptide
RMYSPDHRQK

SEQ ID NO: 1955 - protein, 9 aa, Artificial Sequence
  Artifcially synthesized peptide
RMYSPERSK

SEQ ID NO: 1956 - protein, 10 aa, Artificial Sequence
  Artifcially synthesized peptide
RMYSPIIYQA

SEQ ID NO: 1957 - protein, 10 aa, Artificial Sequence
  Artifcially synthesized peptide
RMYSPIPPSL

SEQ ID NO: 1958 - protein, 9 aa, Artificial Sequence
  Artifcially synthesized peptide
RMYSPRNSK

SEQ ID NO: 1959 - protein, 9 aa, Artificial Sequence
  Artifcially synthesized peptide
RMYSPYNHK

SEQ ID NO: 1960 - protein, 9 aa, Artificial Sequence
  Artifcially synthesized peptide
RMYSPYNHR

SEQ ID NO: 1961 - protein, 9 aa, Artificial Sequence
  Artifcially synthesized peptide
RMYSYPRQK

SEQ ID NO: 1962 - protein, 14 aa, Artificial Sequence
  Artifcially synthesized peptide
RMYVTTSTRTYSLG

SEQ ID NO: 1963 - protein, 14 aa, Artificial Sequence
  Artifcially synthesized peptide
RMYVTTSTRTYSLK

SEQ ID NO: 1964 - protein, 14 aa, Artificial Sequence
  Artifcially synthesized peptide
RMYVTTSTRTYSLY

SEQ ID NO: 1965 - protein, 9 aa, Artificial Sequence
  Artifcially synthesized peptide
RNKSYSFIA

SEQ ID NO: 1966 - protein, 9 aa, Artificial Sequence
  Artifcially synthesized peptide
RNLSSPFIF

SEQ ID NO: 1967 - protein, 9 aa, Artificial Sequence
  Artifcially synthesized peptide
RPSSAPDLM

SEQ ID NO: 1968 - protein, 9 aa, Artificial Sequence
  Artifcially synthesized peptide
RPSSGFYEL

SEQ ID NO: 1969 - protein, 8 aa, Artificial Sequence
  Artifcially synthesized peptide
RPSSLPDL

SEQ ID NO: 1970 - protein, 9 aa, Artificial Sequence
  Artifcially synthesized peptide
RPSSPALYF

SEQ ID NO: 1971 - protein, 9 aa, Artificial Sequence
  Artifcially synthesized peptide
RPSSPIPLL

SEQ ID NO: 1972 - protein, 10 aa, Artificial Sequence
  Artifcially synthesized peptide
RPSTPTIDVL

SEQ ID NO: 1973 - protein, 9 aa, Artificial Sequence
  Artifcially synthesized peptide
RPSTPTINV

SEQ ID NO: 1974 - protein, 10 aa, Artificial Sequence
  Artifcially synthesized peptide
RPSTPTINVL

SEQ ID NO: 1975 - protein, 9 aa, Artificial Sequence
  Artifcially synthesized peptide
RPTSPIQIM

SEQ ID NO: 1976 - protein, 10 aa, Artificial Sequence
  Artifcially synthesized peptide
RPASTGGLSL

SEQ ID NO: 1977 - protein, 9 aa, Artificial Sequence
  Artifcially synthesized peptide
RPAFFSPSL

SEQ ID NO: 1978 - protein, 9 aa, Artificial Sequence
  Artifcially synthesized peptide
RPAKSMDSF

SEQ ID NO: 1979 - protein, 9 aa, Artificial Sequence
  Artifcially synthesized peptide
RPAKSMDSL

SEQ ID NO: 1980 - protein, 9 aa, Artificial Sequence
  Artifcially synthesized peptide
RPAKSMDSM

SEQ ID NO: 1981 - protein, 8 aa, Artificial Sequence
  Artifcially synthesized peptide
RPAKSMDV

SEQ ID NO: 1982 - protein, 10 aa, Artificial Sequence
  Artifcially synthesized peptide
RPARPSRKGL

SEQ ID NO: 1983 - protein, 9 aa, Artificial Sequence
  Artifcially synthesized peptide
RPASAGAMF

SEQ ID NO: 1984 - protein, 9 aa, Artificial Sequence
  Artifcially synthesized peptide
RPASAGAML

SEQ ID NO: 1985 - protein, 9 aa, Artificial Sequence
  Artifcially synthesized peptide
RPASAGAMM

SEQ ID NO: 1986 - protein, 9 aa, Artificial Sequence
  Artifcially synthesized peptide
RPASAGAMV

SEQ ID NO: 1987 - protein, 11 aa, Artificial Sequence
  Artifcially synthesized peptide
RPASARAQPGF

SEQ ID NO: 1988 - protein, 11 aa, Artificial Sequence
  Artifcially synthesized peptide
RPASARAQPGL

SEQ ID NO: 1989 - protein, 11 aa, Artificial Sequence
  Artifcially synthesized peptide
RPASARAQPGM

SEQ ID NO: 1990 - protein, 11 aa, Artificial Sequence
  Artifcially synthesized peptide
RPASARAQPGV

SEQ ID NO: 1991 - protein, 11 aa, Artificial Sequence
  Artifcially synthesized peptide
RPASEARAPGL

SEQ ID NO: 1992 - protein, 9 aa, Artificial Sequence
  Artifcially synthesized peptide
RPASPAAKF

SEQ ID NO: 1993 - protein, 9 aa, Artificial Sequence
  Artifcially synthesized peptide
RPASPAAKL

SEQ ID NO: 1994 - protein, 9 aa, Artificial Sequence
  Artifcially synthesized peptide
RPASPAAKM

SEQ ID NO: 1995 - protein, 9 aa, Artificial Sequence
  Artifcially synthesized peptide
RPASPAAKV

SEQ ID NO: 1996 - protein, 9 aa, Artificial Sequence
  Artifcially synthesized peptide
RPASPALLL

SEQ ID NO: 1997 - protein, 9 aa, Artificial Sequence
  Artifcially synthesized peptide
RPASPEPEL

SEQ ID NO: 1998 - protein, 9 aa, Artificial Sequence
  Artifcially synthesized peptide
RPASPGPSL

SEQ ID NO: 1999 - protein, 9 aa, Artificial Sequence
  Artifcially synthesized peptide
RPASPLMHI

SEQ ID NO: 2000 - protein, 10 aa, Artificial Sequence
  Artifcially synthesized peptide
RPASPQRAQL

SEQ ID NO: 2001 - protein, 9 aa, Artificial Sequence
  Artifcially synthesized peptide
RPASPSLQL

SEQ ID NO: 2002 - protein, 10 aa, Artificial Sequence
  Artifcially synthesized peptide
RPASPSLQLL

SEQ ID NO: 2003 - protein, 19 aa, Artificial Sequence
  Artifcially synthesized peptide
RPASPTAIRRIGSVTSRQT

SEQ ID NO: 2004 - protein, 9 aa, Artificial Sequence
  Artifcially synthesized peptide
RPASRFEVL

SEQ ID NO: 2005 - protein, 11 aa, Artificial Sequence
  Artifcially synthesized peptide
RPASYKKKSML

SEQ ID NO: 2006 - protein, 10 aa, Artificial Sequence
  Artifcially synthesized peptide
RPATFFPFVA

SEQ ID NO: 2007 - protein, 10 aa, Artificial Sequence
  Artifcially synthesized peptide
RPATGGPGVA

SEQ ID NO: 2008 - protein, 10 aa, Artificial Sequence
  Artifcially synthesized peptide
RPATGGPGVF

SEQ ID NO: 2009 - protein, 10 aa, Artificial Sequence
  Artifcially synthesized peptide
RPATGGPGVL

SEQ ID NO: 2010 - protein, 10 aa, Artificial Sequence
  Artifcially synthesized peptide
RPATGGPGVM

SEQ ID NO: 2011 - protein, 10 aa, Artificial Sequence
  Artifcially synthesized peptide
RPATGGPGVV

SEQ ID NO: 2012 - protein, 8 aa, Artificial Sequence
  Artifcially synthesized peptide
RPATPHLL

SEQ ID NO: 2013 - protein, 9 aa, Artificial Sequence
  Artifcially synthesized peptide
RPATPTSQF

SEQ ID NO: 2014 - protein, 9 aa, Artificial Sequence
  Artifcially synthesized peptide
RPATPTSQL

SEQ ID NO: 2015 - protein, 9 aa, Artificial Sequence
  Artifcially synthesized peptide
RPATPTSQM

SEQ ID NO: 2016 - protein, 9 aa, Artificial Sequence
  Artifcially synthesized peptide
RPATPTSQV

SEQ ID NO: 2017 - protein, 9 aa, Artificial Sequence
  Artifcially synthesized peptide
RPDSAHKML

SEQ ID NO: 2018 - protein, 10 aa, Artificial Sequence
  Artifcially synthesized peptide
RPDSPTRPTL

SEQ ID NO: 2019 - protein, 11 aa, Artificial Sequence
  Artifcially synthesized peptide
RPDSRLGKTEF

SEQ ID NO: 2020 - protein, 11 aa, Artificial Sequence
  Artifcially synthesized peptide
RPDSRLGKTEL

SEQ ID NO: 2021 - protein, 11 aa, Artificial Sequence
  Artifcially synthesized peptide
RPDSRLGKTEL

SEQ ID NO: 2022 - protein, 11 aa, Artificial Sequence
  Artifcially synthesized peptide
RPDSRLGKTEM

SEQ ID NO: 2023 - protein, 11 aa, Artificial Sequence
  Artifcially synthesized peptide
RPDSRLGKTEV

SEQ ID NO: 2024 - protein, 9 aa, Artificial Sequence
  Artifcially synthesized peptide
RPDSRLLEL

SEQ ID NO: 2025 - protein, 10 aa, Artificial Sequence
  Artifcially synthesized peptide
RPDVAKRLSL

SEQ ID NO: 2026 - protein, 10 aa, Artificial Sequence
  Artifcially synthesized peptide
RPESDSGLKF

SEQ ID NO: 2027 - protein, 10 aa, Artificial Sequence
  Artifcially synthesized peptide
RPESDSGLKL

SEQ ID NO: 2028 - protein, 10 aa, Artificial Sequence
  Artifcially synthesized peptide
RPESDSGLKM

SEQ ID NO: 2029 - protein, 10 aa, Artificial Sequence
  Artifcially synthesized peptide
RPESDSGLKV

SEQ ID NO: 2030 - protein, 9 aa, Artificial Sequence
  Artifcially synthesized peptide
RPESKDRKF

SEQ ID NO: 2031 - protein, 9 aa, Artificial Sequence
  Artifcially synthesized peptide
RPESKDRKL

SEQ ID NO: 2032 - protein, 9 aa, Artificial Sequence
  Artifcially synthesized peptide
RPESKDRKM

SEQ ID NO: 2033 - protein, 9 aa, Artificial Sequence
  Artifcially synthesized peptide
RPESKDRKV

SEQ ID NO: 2034 - protein, 9 aa, Artificial Sequence
  Artifcially synthesized peptide
RPESPAGPF

SEQ ID NO: 2035 - protein, 11 aa, Artificial Sequence
  Artifcially synthesized peptide
RPFHGISTVSL

SEQ ID NO: 2036 - protein, 9 aa, Artificial Sequence
  Artifcially synthesized peptide
RPFSPREAF

SEQ ID NO: 2037 - protein, 9 aa, Artificial Sequence
  Artifcially synthesized peptide
RPFSPREAL

SEQ ID NO: 2038 - protein, 9 aa, Artificial Sequence
  Artifcially synthesized peptide
RPFSPREAM

SEQ ID NO: 2039 - protein, 9 aa, Artificial Sequence
  Artifcially synthesized peptide
RPFSPREAV

SEQ ID NO: 2040 - protein, 9 aa, Artificial Sequence
  Artifcially synthesized peptide
RPGSLERKF

SEQ ID NO: 2041 - protein, 9 aa, Artificial Sequence
  Artifcially synthesized peptide
RPGSLERKL

SEQ ID NO: 2042 - protein, 9 aa, Artificial Sequence
  Artifcially synthesized peptide
RPGSLERKM

SEQ ID NO: 2043 - protein, 9 aa, Artificial Sequence
  Artifcially synthesized peptide
RPGSLERKV

SEQ ID NO: 2044 - protein, 9 aa, Artificial Sequence
  Artifcially synthesized peptide
RPGSRQAGL

SEQ ID NO: 2045 - protein, 11 aa, Artificial Sequence
  Artifcially synthesized peptide
RPHLSGRKLSL

SEQ ID NO: 2046 - protein, 9 aa, Artificial Sequence
  Artifcially synthesized peptide
RPHSPEKAF

SEQ ID NO: 2047 - protein, 9 aa, Artificial Sequence
  Artifcially synthesized peptide
RPHSPEKAL

SEQ ID NO: 2048 - protein, 9 aa, Artificial Sequence
  Artifcially synthesized peptide
RPHSPEKAM

SEQ ID NO: 2049 - protein, 9 aa, Artificial Sequence
  Artifcially synthesized peptide
RPHSPEKAV

SEQ ID NO: 2050 - protein, 9 aa, Artificial Sequence
  Artifcially synthesized peptide
RPHTPTPGI

SEQ ID NO: 2051 - protein, 11 aa, Artificial Sequence
  Artifcially synthesized peptide
RPHTPTPGIYM

SEQ ID NO: 2052 - protein, 9 aa, Artificial Sequence
  Artifcially synthesized peptide
RPISPGLSF

SEQ ID NO: 2053 - protein, 9 aa, Artificial Sequence
  Artifcially synthesized peptide
RPISPGLSL

SEQ ID NO: 2054 - protein, 9 aa, Artificial Sequence
  Artifcially synthesized peptide
RPISPGLSM

SEQ ID NO: 2055 - protein, 9 aa, Artificial Sequence
  Artifcially synthesized peptide
RPISPGLSV

SEQ ID NO: 2056 - protein, 9 aa, Artificial Sequence
  Artifcially synthesized peptide
RPISPGLSY

SEQ ID NO: 2057 - protein, 9 aa, Artificial Sequence
  Artifcially synthesized peptide
RPISPPHTY

SEQ ID NO: 2058 - protein, 10 aa, Artificial Sequence
  Artifcially synthesized peptide
RPISPRIGAL

SEQ ID NO: 2059 - protein, 11 aa, Artificial Sequence
  Artifcially synthesized peptide
RPISVIGGVSL

SEQ ID NO: 2060 - protein, 12 aa, Artificial Sequence
  Artifcially synthesized peptide
RPISVIGGVSLY

SEQ ID NO: 2061 - protein, 10 aa, Artificial Sequence
  Artifcially synthesized peptide
RPITPPRNSA

SEQ ID NO: 2062 - protein, 10 aa, Artificial Sequence
  Artifcially synthesized peptide
RPITPPRNSF

SEQ ID NO: 2063 - protein, 10 aa, Artificial Sequence
  Artifcially synthesized peptide
RPITPPRNSL

SEQ ID NO: 2064 - protein, 10 aa, Artificial Sequence
  Artifcially synthesized peptide
RPITPPRNSM

SEQ ID NO: 2065 - protein, 10 aa, Artificial Sequence
  Artifcially synthesized peptide
RPITPPRNSV

SEQ ID NO: 2066 - protein, 10 aa, Artificial Sequence
  Artifcially synthesized peptide
RPKLHHSLSF

SEQ ID NO: 2067 - protein, 9 aa, Artificial Sequence
  Artifcially synthesized peptide
RPKLSSPAF

SEQ ID NO: 2068 - protein, 9 aa, Artificial Sequence
  Artifcially synthesized peptide
RPKLSSPAL

SEQ ID NO: 2069 - protein, 9 aa, Artificial Sequence
  Artifcially synthesized peptide
RPKLSSPAM

SEQ ID NO: 2070 - protein, 9 aa, Artificial Sequence
  Artifcially synthesized peptide
RPKLSSPAV

SEQ ID NO: 2071 - protein, 11 aa, Artificial Sequence
  Artifcially synthesized peptide
RPKPSSSPVIF

SEQ ID NO: 2072 - protein, 9 aa, Artificial Sequence
  Artifcially synthesized peptide
RPKPSSSPL

SEQ ID NO: 2073 - protein, 9 aa, Artificial Sequence
  Artifcially synthesized peptide
RPKPSSSPM

SEQ ID NO: 2074 - protein, 9 aa, Artificial Sequence
  Artifcially synthesized peptide
RPKPSSSPV

SEQ ID NO: 2075 - protein, 10 aa, Artificial Sequence
  Artifcially synthesized peptide
RPKPSSSPVI

SEQ ID NO: 2076 - protein, 9 aa, Artificial Sequence
  Artifcially synthesized peptide
RPKSDIVLL

SEQ ID NO: 2077 - protein, 9 aa, Artificial Sequence
  Artifcially synthesized peptide
RPKSNIVLF

SEQ ID NO: 2078 - protein, 9 aa, Artificial Sequence
  Artifcially synthesized peptide
RPKSNIVLL

SEQ ID NO: 2079 - protein, 9 aa, Artificial Sequence
  Artifcially synthesized peptide
RPKSNIVLM

SEQ ID NO: 2080 - protein, 9 aa, Artificial Sequence
  Artifcially synthesized peptide
RPKSNIVLV

SEQ ID NO: 2081 - protein, 10 aa, Artificial Sequence
  Artifcially synthesized peptide
RPKSPGGIQP

SEQ ID NO: 2082 - protein, 9 aa, Artificial Sequence
  Artifcially synthesized peptide
RPKSPLSKM

SEQ ID NO: 2083 - protein, 9 aa, Artificial Sequence
  Artifcially synthesized peptide
RPKSQVAEF

SEQ ID NO: 2084 - protein, 9 aa, Artificial Sequence
  Artifcially synthesized peptide
RPKSQVAEL

SEQ ID NO: 2085 - protein, 9 aa, Artificial Sequence
  Artifcially synthesized peptide
RPKSQVAEM

SEQ ID NO: 2086 - protein, 9 aa, Artificial Sequence
  Artifcially synthesized peptide
RPKSQVAEV

SEQ ID NO: 2087 - protein, 10 aa, Artificial Sequence
  Artifcially synthesized peptide
RPKSSSPIRL

SEQ ID NO: 2088 - protein, 10 aa, Artificial Sequence
  Artifcially synthesized peptide
RPKSVDFDSL

SEQ ID NO: 2089 - protein, 10 aa, Artificial Sequence
  Artifcially synthesized peptide
RPKTPNRASP

SEQ ID NO: 2090 - protein, 9 aa, Artificial Sequence
  Artifcially synthesized peptide
RPKTPPPAP

SEQ ID NO: 2091 - protein, 9 aa, Artificial Sequence
  Artifcially synthesized peptide
RPKTPPVVI

SEQ ID NO: 2092 - protein, 9 aa, Artificial Sequence
  Artifcially synthesized peptide
RPLKPLSPL

SEQ ID NO: 2093 - protein, 10 aa, Artificial Sequence
  Artifcially synthesized peptide
RPLSATRKTL

SEQ ID NO: 2094 - protein, 11 aa, Artificial Sequence
  Artifcially synthesized peptide
RPLSGSGISAF

SEQ ID NO: 2095 - protein, 9 aa, Artificial Sequence
  Artifcially synthesized peptide
RPLSHYSSF

SEQ ID NO: 2096 - protein, 9 aa, Artificial Sequence
  Artifcially synthesized peptide
RPLSKQLSA

SEQ ID NO: 2097 - protein, 10 aa, Artificial Sequence
  Artifcially synthesized peptide
RPLSLIGSTL

SEQ ID NO: 2098 - protein, 9 aa, Artificial Sequence
  Artifcially synthesized peptide
RPLSLLLAL

SEQ ID NO: 2099 - protein, 10 aa, Artificial Sequence
  Artifcially synthesized peptide
RPLSPGALEL

SEQ ID NO: 2100 - protein, 10 aa, Artificial Sequence
  Artifcially synthesized peptide
RPLSPGALQL

SEQ ID NO: 2101 - protein, 9 aa, Artificial Sequence
  Artifcially synthesized peptide
RPLSPGGAF

SEQ ID NO: 2102 - protein, 9 aa, Artificial Sequence
  Artifcially synthesized peptide
RPLSPGGAL

SEQ ID NO: 2103 - protein, 9 aa, Artificial Sequence
  Artifcially synthesized peptide
RPLSPGGAM

SEQ ID NO: 2104 - protein, 9 aa, Artificial Sequence
  Artifcially synthesized peptide
RPLSPGGAV

SEQ ID NO: 2105 - protein, 9 aa, Artificial Sequence
  Artifcially synthesized peptide
RPLSPILHI

SEQ ID NO: 2106 - protein, 8 aa, Artificial Sequence
  Artifcially synthesized peptide
RPLSPLLF

SEQ ID NO: 2107 - protein, 8 aa, Artificial Sequence
  Artifcially synthesized peptide
RPLSPLLL

SEQ ID NO: 2108 - protein, 8 aa, Artificial Sequence
  Artifcially synthesized peptide
RPLSPLLM

SEQ ID NO: 2109 - protein, 8 aa, Artificial Sequence
  Artifcially synthesized peptide
RPLSPLLV

SEQ ID NO: 2110 - protein, 10 aa, Artificial Sequence
  Artifcially synthesized peptide
RPLSPTAFSL

SEQ ID NO: 2111 - protein, 9 aa, Artificial Sequence
  Artifcially synthesized peptide
RPLSSSHEA

SEQ ID NO: 2112 - protein, 9 aa, Artificial Sequence
  Artifcially synthesized peptide
RPLSVVYVL

SEQ ID NO: 2113 - protein, 9 aa, Artificial Sequence
  Artifcially synthesized peptide
RPLTPRTPA

SEQ ID NO: 2114 - protein, 9 aa, Artificial Sequence
  Artifcially synthesized peptide
RPLTSPESL

SEQ ID NO: 2115 - protein, 9 aa, Artificial Sequence
  Artifcially synthesized peptide
RPMSESPHM

SEQ ID NO: 2116 - protein, 10 aa, Artificial Sequence
  Artifcially synthesized peptide
RPNSPSPTAF

SEQ ID NO: 2117 - protein, 10 aa, Artificial Sequence
  Artifcially synthesized peptide
RPNSPSPTAL

SEQ ID NO: 2118 - protein, 10 aa, Artificial Sequence
  Artifcially synthesized peptide
RPNSPSPTAM

SEQ ID NO: 2119 - protein, 10 aa, Artificial Sequence
  Artifcially synthesized peptide
RPNSPSPTAV

SEQ ID NO: 2120 - protein, 9 aa, Artificial Sequence
  Artifcially synthesized peptide
RPPITQSSL

SEQ ID NO: 2121 - protein, 10 aa, Artificial Sequence
  Artifcially synthesized peptide
RPPPPPDTPF

SEQ ID NO: 2122 - protein, 10 aa, Artificial Sequence
  Artifcially synthesized peptide
RPPPPPDTPL

SEQ ID NO: 2123 - protein, 10 aa, Artificial Sequence
  Artifcially synthesized peptide
RPPPPPDTPM

SEQ ID NO: 2124 - protein, 10 aa, Artificial Sequence
  Artifcially synthesized peptide
RPPPPPDTPP

SEQ ID NO: 2125 - protein, 10 aa, Artificial Sequence
  Artifcially synthesized peptide
RPPPPPDTPV

SEQ ID NO: 2126 - protein, 10 aa, Artificial Sequence
  Artifcially synthesized peptide
RPPQSSSVSL

SEQ ID NO: 2127 - protein, 9 aa, Artificial Sequence
  Artifcially synthesized peptide
RPPSPGPVF

SEQ ID NO: 2128 - protein, 9 aa, Artificial Sequence
  Artifcially synthesized peptide
RPPSPGPVL

SEQ ID NO: 2129 - protein, 9 aa, Artificial Sequence
  Artifcially synthesized peptide
RPPSPGPVM

SEQ ID NO: 2130 - protein, 9 aa, Artificial Sequence
  Artifcially synthesized peptide
RPPSPGPVV

SEQ ID NO: 2131 - protein, 9 aa, Artificial Sequence
  Artifcially synthesized peptide
RPPSPSSRF

SEQ ID NO: 2132 - protein, 9 aa, Artificial Sequence
  Artifcially synthesized peptide
RPPSPSSRL

SEQ ID NO: 2133 - protein, 9 aa, Artificial Sequence
  Artifcially synthesized peptide
RPPSPSSRM

SEQ ID NO: 2134 - protein, 9 aa, Artificial Sequence
  Artifcially synthesized peptide
RPPSPSSRV

SEQ ID NO: 2135 - protein, 10 aa, Artificial Sequence
  Artifcially synthesized peptide
RPPSSEFLDF

SEQ ID NO: 2136 - protein, 10 aa, Artificial Sequence
  Artifcially synthesized peptide
RPPSSEFLDL

SEQ ID NO: 2137 - protein, 10 aa, Artificial Sequence
  Artifcially synthesized peptide
RPPSSEFLDM

SEQ ID NO: 2138 - protein, 10 aa, Artificial Sequence
  Artifcially synthesized peptide
RPPSSEFLDV

SEQ ID NO: 2139 - protein, 9 aa, Artificial Sequence
  Artifcially synthesized peptide
RPPSSSQQL

SEQ ID NO: 2140 - protein, 9 aa, Artificial Sequence
  Artifcially synthesized peptide
RPPTPTLSL

SEQ ID NO: 2141 - protein, 12 aa, Artificial Sequence
  Artifcially synthesized peptide
RPPTSPGVFGAL

SEQ ID NO: 2142 - protein, 10 aa, Artificial Sequence
  Artifcially synthesized peptide
RPPVTKASSF

SEQ ID NO: 2143 - protein, 9 aa, Artificial Sequence
  Artifcially synthesized peptide
RPQKTQSII

SEQ ID NO: 2144 - protein, 10 aa, Artificial Sequence
  Artifcially synthesized peptide
RPQRATSNVF

SEQ ID NO: 2145 - protein, 10 aa, Artificial Sequence
  Artifcially synthesized peptide
RPQRATSNVF

SEQ ID NO: 2146 - protein, 10 aa, Artificial Sequence
  Artifcially synthesized peptide
RPQRATSNVL

SEQ ID NO: 2147 - protein, 10 aa, Artificial Sequence
  Artifcially synthesized peptide
RPQRATSNVM

SEQ ID NO: 2148 - protein, 10 aa, Artificial Sequence
  Artifcially synthesized peptide
RPQRATSNVV

SEQ ID NO: 2149 - protein, 9 aa, Artificial Sequence
  Artifcially synthesized peptide
RPQTPKEEA

SEQ ID NO: 2150 - protein, 10 aa, Artificial Sequence
  Artifcially synthesized peptide
RPRSISVEEF

SEQ ID NO: 2151 - protein, 9 aa, Artificial Sequence
  Artifcially synthesized peptide
RPRSPSPIS

SEQ ID NO: 2152 - protein, 12 aa, Artificial Sequence
  Artifcially synthesized peptide
RPRSTSQSIVSL

SEQ ID NO: 2153 - protein, 8 aa, Artificial Sequence
  Artifcially synthesized peptide
RPRAATVV

SEQ ID NO: 2154 - protein, 9 aa, Artificial Sequence
  Artifcially synthesized peptide
RPRAATVVA

SEQ ID NO: 2155 - protein, 11 aa, Artificial Sequence
  Artifcially synthesized peptide
RPRANSGGVDF

SEQ ID NO: 2156 - protein, 11 aa, Artificial Sequence
  Artifcially synthesized peptide
RPRANSGGVDL

SEQ ID NO: 2157 - protein, 11 aa, Artificial Sequence
  Artifcially synthesized peptide
RPRANSGGVDM

SEQ ID NO: 2158 - protein, 11 aa, Artificial Sequence
  Artifcially synthesized peptide
RPRANSGGVDV

SEQ ID NO: 2159 - protein, 10 aa, Artificial Sequence
  Artifcially synthesized peptide
RPRARSVDAL

SEQ ID NO: 2160 - protein, 10 aa, Artificial Sequence
  Artifcially synthesized peptide
RPRDTRRISL

SEQ ID NO: 2161 - protein, 11 aa, Artificial Sequence
  Artifcially synthesized peptide
RPRGPSPLVTM

SEQ ID NO: 2162 - protein, 9 aa, Artificial Sequence
  Artifcially synthesized peptide
RPRGSESLL

SEQ ID NO: 2163 - protein, 9 aa, Artificial Sequence
  Artifcially synthesized peptide
RPRGSQSLF

SEQ ID NO: 2164 - protein, 9 aa, Artificial Sequence
  Artifcially synthesized peptide
RPRGSQSLL

SEQ ID NO: 2165 - protein, 9 aa, Artificial Sequence
  Artifcially synthesized peptide
RPRGSQSLM

SEQ ID NO: 2166 - protein, 9 aa, Artificial Sequence
  Artifcially synthesized peptide
RPRGSQSLV

SEQ ID NO: 2167 - protein, 9 aa, Artificial Sequence
  Artifcially synthesized peptide
RPRHSLNSL

SEQ ID NO: 2168 - protein, 10 aa, Artificial Sequence
  Artifcially synthesized peptide
RPRIPSPIGF

SEQ ID NO: 2169 - protein, 12 aa, Artificial Sequence
  Artifcially synthesized peptide
RPRPGTGLGRVM

SEQ ID NO: 2170 - protein, 8 aa, Artificial Sequence
  Artifcially synthesized peptide
RPRPSSVL

SEQ ID NO: 2171 - protein, 10 aa, Artificial Sequence
  Artifcially synthesized peptide
RPRPASSPAL

SEQ ID NO: 2172 - protein, 10 aa, Artificial Sequence
  Artifcially synthesized peptide
RPRPHSAPSF

SEQ ID NO: 2173 - protein, 10 aa, Artificial Sequence
  Artifcially synthesized peptide
RPRPHSAPSL

SEQ ID NO: 2174 - protein, 10 aa, Artificial Sequence
  Artifcially synthesized peptide
RPRPHSAPSM

SEQ ID NO: 2175 - protein, 10 aa, Artificial Sequence
  Artifcially synthesized peptide
RPRPHSAPSV

SEQ ID NO: 2176 - protein, 11 aa, Artificial Sequence
  Artifcially synthesized peptide
RPRPSSAHVGL

SEQ ID NO: 2177 - protein, 8 aa, Artificial Sequence
  Artifcially synthesized peptide
RPRPSSVL

SEQ ID NO: 2178 - protein, 11 aa, Artificial Sequence
  Artifcially synthesized peptide
RPRPSSVLRTL

SEQ ID NO: 2179 - protein, 10 aa, Artificial Sequence
  Artifcially synthesized peptide
RPRPVSPSSF

SEQ ID NO: 2180 - protein, 10 aa, Artificial Sequence
  Artifcially synthesized peptide
RPRPVSPSSL

SEQ ID NO: 2181 - protein, 11 aa, Artificial Sequence
  Artifcially synthesized peptide
RPRPVSPSSLL

SEQ ID NO: 2182 - protein, 10 aa, Artificial Sequence
  Artifcially synthesized peptide
RPRPVSPSSM

SEQ ID NO: 2183 - protein, 10 aa, Artificial Sequence
  Artifcially synthesized peptide
RPRPVSPSSV

SEQ ID NO: 2184 - protein, 9 aa, Artificial Sequence
  Artifcially synthesized peptide
RPRRSSTQF

SEQ ID NO: 2185 - protein, 9 aa, Artificial Sequence
  Artifcially synthesized peptide
RPRRSSTQL

SEQ ID NO: 2186 - protein, 9 aa, Artificial Sequence
  Artifcially synthesized peptide
RPRRSSTQM

SEQ ID NO: 2187 - protein, 9 aa, Artificial Sequence
  Artifcially synthesized peptide
RPRRSSTQV

SEQ ID NO: 2188 - protein, 9 aa, Artificial Sequence
  Artifcially synthesized peptide
RPRSAVEQL

SEQ ID NO: 2189 - protein, 8 aa, Artificial Sequence
  Artifcially synthesized peptide
RPRSAVLF

SEQ ID NO: 2190 - protein, 8 aa, Artificial Sequence
  Artifcially synthesized peptide
RPRSAVLL

SEQ ID NO: 2191 - protein, 8 aa, Artificial Sequence
  Artifcially synthesized peptide
RPRSAVLM

SEQ ID NO: 2192 - protein, 8 aa, Artificial Sequence
  Artifcially synthesized peptide
RPRSAVLV

SEQ ID NO: 2193 - protein, 11 aa, Artificial Sequence
  Artifcially synthesized peptide
RPRSGSTGSSL

SEQ ID NO: 2194 - protein, 10 aa, Artificial Sequence
  Artifcially synthesized peptide
RPRSISVEEF

SEQ ID NO: 2195 - protein, 10 aa, Artificial Sequence
  Artifcially synthesized peptide
RPRSISVEEM

SEQ ID NO: 2196 - protein, 10 aa, Artificial Sequence
  Artifcially synthesized peptide
RPRSISVEEV

SEQ ID NO: 2197 - protein, 10 aa, Artificial Sequence
  Artifcially synthesized peptide
RPRSLSSPTV

SEQ ID NO: 2198 - protein, 12 aa, Artificial Sequence
  Artifcially synthesized peptide
RPRSLSSPTVTL

SEQ ID NO: 2199 - protein, 9 aa, Artificial Sequence
  Artifcially synthesized peptide
RPRSLEVTF

SEQ ID NO: 2200 - protein, 9 aa, Artificial Sequence
  Artifcially synthesized peptide
RPRSLEVTI

SEQ ID NO: 2201 - protein, 9 aa, Artificial Sequence
  Artifcially synthesized peptide
RPRSLEVTL

SEQ ID NO: 2202 - protein, 9 aa, Artificial Sequence
  Artifcially synthesized peptide
RPRSLEVTM

SEQ ID NO: 2203 - protein, 9 aa, Artificial Sequence
  Artifcially synthesized peptide
RPRSLEVTV

SEQ ID NO: 2204 - protein, 10 aa, Artificial Sequence
  Artifcially synthesized peptide
RPRSLSSPTV

SEQ ID NO: 2205 - protein, 12 aa, Artificial Sequence
  Artifcially synthesized peptide
RPRSLSSPTVTL

SEQ ID NO: 2206 - protein, 12 aa, Artificial Sequence
  Artifcially synthesized peptide
RPRSLSSPTVTM

SEQ ID NO: 2207 - protein, 12 aa, Artificial Sequence
  Artifcially synthesized peptide
RPRSLSSPTVTV

SEQ ID NO: 2208 - protein, 9 aa, Artificial Sequence
  Artifcially synthesized peptide
RPRSMTVSA

SEQ ID NO: 2209 - protein, 9 aa, Artificial Sequence
  Artifcially synthesized peptide
RPRSMVRSF

SEQ ID NO: 2210 - protein, 9 aa, Artificial Sequence
  Artifcially synthesized peptide
RPRSPAARF

SEQ ID NO: 2211 - protein, 9 aa, Artificial Sequence
  Artifcially synthesized peptide
RPRSPAARL

SEQ ID NO: 2212 - protein, 9 aa, Artificial Sequence
  Artifcially synthesized peptide
RPRSPAARM

SEQ ID NO: 2213 - protein, 9 aa, Artificial Sequence
  Artifcially synthesized peptide
RPRSPAARV

SEQ ID NO: 2214 - protein, 11 aa, Artificial Sequence
  Artifcially synthesized peptide
RPRSPGSNSKV

SEQ ID NO: 2215 - protein, 12 aa, Artificial Sequence
  Artifcially synthesized peptide
RPRSPGSNSKVP

SEQ ID NO: 2216 - protein, 10 aa, Artificial Sequence
  Artifcially synthesized peptide
RPRSPNMQDL

SEQ ID NO: 2217 - protein, 9 aa, Artificial Sequence
  Artifcially synthesized peptide
RPRSPPGGP

SEQ ID NO: 2218 - protein, 10 aa, Artificial Sequence
  Artifcially synthesized peptide
RPRSPPPRAF

SEQ ID NO: 2219 - protein, 10 aa, Artificial Sequence
  Artifcially synthesized peptide
RPRSPPPRAL

SEQ ID NO: 2220 - protein, 10 aa, Artificial Sequence
  Artifcially synthesized peptide
RPRSPPPRAM

SEQ ID NO: 2221 - protein, 10 aa, Artificial Sequence
  Artifcially synthesized peptide
RPRSPPPRAP

SEQ ID NO: 2222 - protein, 10 aa, Artificial Sequence
  Artifcially synthesized peptide
RPRSPPPRAV

SEQ ID NO: 2223 - protein, 9 aa, Artificial Sequence
  Artifcially synthesized peptide
RPRSPPSSP

SEQ ID NO: 2224 - protein, 10 aa, Artificial Sequence
  Artifcially synthesized peptide
RPRSPRENSF

SEQ ID NO: 2225 - protein, 10 aa, Artificial Sequence
  Artifcially synthesized peptide
RPRSPRENSI

SEQ ID NO: 2226 - protein, 10 aa, Artificial Sequence
  Artifcially synthesized peptide
RPRSPRENSL

SEQ ID NO: 2227 - protein, 10 aa, Artificial Sequence
  Artifcially synthesized peptide
RPRSPRENSM

SEQ ID NO: 2228 - protein, 10 aa, Artificial Sequence
  Artifcially synthesized peptide
RPRSPRENSV

SEQ ID NO: 2229 - protein, 9 aa, Artificial Sequence
  Artifcially synthesized peptide
RPRSPRPPP

SEQ ID NO: 2230 - protein, 10 aa, Artificial Sequence
  Artifcially synthesized peptide
RPRSPRQNLI

SEQ ID NO: 2231 - protein, 10 aa, Artificial Sequence
  Artifcially synthesized peptide
RPRSPRQNSF

SEQ ID NO: 2232 - protein, 10 aa, Artificial Sequence
  Artifcially synthesized peptide
RPRSPRQNSI

SEQ ID NO: 2233 - protein, 10 aa, Artificial Sequence
  Artifcially synthesized peptide
RPRSPRQNSM

SEQ ID NO: 2234 - protein, 10 aa, Artificial Sequence
  Artifcially synthesized peptide
RPRSPRQNSV

SEQ ID NO: 2235 - protein, 9 aa, Artificial Sequence
  Artifcially synthesized peptide
RPRSPSPIF

SEQ ID NO: 2236 - protein, 9 aa, Artificial Sequence
  Artifcially synthesized peptide
RPRSPSPIL

SEQ ID NO: 2237 - protein, 9 aa, Artificial Sequence
  Artifcially synthesized peptide
RPRSPSPIM

SEQ ID NO: 2238 - protein, 9 aa, Artificial Sequence
  Artifcially synthesized peptide
RPRSPSPIS

SEQ ID NO: 2239 - protein, 9 aa, Artificial Sequence
  Artifcially synthesized peptide
RPRSPSPIV

SEQ ID NO: 2240 - protein, 10 aa, Artificial Sequence
  Artifcially synthesized peptide
RPRSPSSYDL

SEQ ID NO: 2241 - protein, 8 aa, Artificial Sequence
  Artifcially synthesized peptide
RPRSPTGF

SEQ ID NO: 2242 - protein, 8 aa, Artificial Sequence
  Artifcially synthesized peptide
RPRSPTGL

SEQ ID NO: 2243 - protein, 8 aa, Artificial Sequence
  Artifcially synthesized peptide
RPRSPTGM

SEQ ID NO: 2244 - protein, 8 aa, Artificial Sequence
  Artifcially synthesized peptide
RPRSPTGP

SEQ ID NO: 2245 - protein, 12 aa, Artificial Sequence
  Artifcially synthesized peptide
RPRSPTGPSNSF

SEQ ID NO: 2246 - protein, 13 aa, Artificial Sequence
  Artifcially synthesized peptide
RPRSPTGPSNSFL

SEQ ID NO: 2247 - protein, 12 aa, Artificial Sequence
  Artifcially synthesized peptide
RPRSPTGPSNSL

SEQ ID NO: 2248 - protein, 12 aa, Artificial Sequence
  Artifcially synthesized peptide
RPRSPTGPSNSM

SEQ ID NO: 2249 - protein, 12 aa, Artificial Sequence
  Artifcially synthesized peptide
RPRSPTGPSNSV

SEQ ID NO: 2250 - protein, 11 aa, Artificial Sequence
  Artifcially synthesized peptide
RPRSPTGSNSF

SEQ ID NO: 2251 - protein, 8 aa, Artificial Sequence
  Artifcially synthesized peptide
RPRSPTGV

SEQ ID NO: 2252 - protein, 9 aa, Artificial Sequence
  Artifcially synthesized peptide
RPRSPTRSF

SEQ ID NO: 2253 - protein, 9 aa, Artificial Sequence
  Artifcially synthesized peptide
RPRSPTRSL

SEQ ID NO: 2254 - protein, 9 aa, Artificial Sequence
  Artifcially synthesized peptide
RPRSPTRSM

SEQ ID NO: 2255 - protein, 9 aa, Artificial Sequence
  Artifcially synthesized peptide
RPRSPTRSV

SEQ ID NO: 2256 - protein, 9 aa, Artificial Sequence
  Artifcially synthesized peptide
RPRSPWGKL

SEQ ID NO: 2257 - protein, 10 aa, Artificial Sequence
  Artifcially synthesized peptide
RPRSQYNTKL

SEQ ID NO: 2258 - protein, 10 aa, Artificial Sequence
  Artifcially synthesized peptide
RPRTNTPKQL

SEQ ID NO: 2259 - protein, 9 aa, Artificial Sequence
  Artifcially synthesized peptide
RPRTPLRSL

SEQ ID NO: 2260 - protein, 9 aa, Artificial Sequence
  Artifcially synthesized peptide
RPSGRRESF

SEQ ID NO: 2261 - protein, 9 aa, Artificial Sequence
  Artifcially synthesized peptide
RPSGRRESL

SEQ ID NO: 2262 - protein, 9 aa, Artificial Sequence
  Artifcially synthesized peptide
RPSGRRESM

SEQ ID NO: 2263 - protein, 9 aa, Artificial Sequence
  Artifcially synthesized peptide
RPSGRRESV

SEQ ID NO: 2264 - protein, 10 aa, Artificial Sequence
  Artifcially synthesized peptide
RPSLGGRTPL

SEQ ID NO: 2265 - protein, 7 aa, Artificial Sequence
  Artifcially synthesized peptide
RPSNPQL

SEQ ID NO: 2266 - protein, 9 aa, Artificial Sequence
  Artifcially synthesized peptide
RPSRSSPGF

SEQ ID NO: 2267 - protein, 9 aa, Artificial Sequence
  Artifcially synthesized peptide
RPSRSSPGL

SEQ ID NO: 2268 - protein, 9 aa, Artificial Sequence
  Artifcially synthesized peptide
RPSRSSPGM

SEQ ID NO: 2269 - protein, 9 aa, Artificial Sequence
  Artifcially synthesized peptide
RPSRSSPGV

SEQ ID NO: 2270 - protein, 9 aa, Artificial Sequence
  Artifcially synthesized peptide
RPSSGFYEL

SEQ ID NO: 2271 - protein, 9 aa, Artificial Sequence
  Artifcially synthesized peptide
RPSSAPDLM

SEQ ID NO: 2272 - protein, 12 aa, Artificial Sequence
  Artifcially synthesized peptide
RPSSLDAEIDSF

SEQ ID NO: 2273 - protein, 12 aa, Artificial Sequence
  Artifcially synthesized peptide
RPSSLDAEIDSL

SEQ ID NO: 2274 - protein, 12 aa, Artificial Sequence
  Artifcially synthesized peptide
RPSSLDAEIDSM

SEQ ID NO: 2275 - protein, 12 aa, Artificial Sequence
  Artifcially synthesized peptide
RPSSLDAEIDSV

SEQ ID NO: 2276 - protein, 8 aa, Artificial Sequence
  Artifcially synthesized peptide
RPSSLPDF

SEQ ID NO: 2277 - protein, 8 aa, Artificial Sequence
  Artifcially synthesized peptide
RPSSLPDL

SEQ ID NO: 2278 - protein, 8 aa, Artificial Sequence
  Artifcially synthesized peptide
RPSSLPDM

SEQ ID NO: 2279 - protein, 8 aa, Artificial Sequence
  Artifcially synthesized peptide
RPSSLPDV

SEQ ID NO: 2280 - protein, 9 aa, Artificial Sequence
  Artifcially synthesized peptide
RPSSPALYF

SEQ ID NO: 2281 - protein, 9 aa, Artificial Sequence
  Artifcially synthesized peptide
RPSSPALYL

SEQ ID NO: 2282 - protein, 9 aa, Artificial Sequence
  Artifcially synthesized peptide
RPSSPALYM

SEQ ID NO: 2283 - protein, 9 aa, Artificial Sequence
  Artifcially synthesized peptide
RPSSPALYV

SEQ ID NO: 2284 - protein, 13 aa, Artificial Sequence
  Artifcially synthesized peptide
RPSSPRAGAPHAL

SEQ ID NO: 2285 - protein, 10 aa, Artificial Sequence
  Artifcially synthesized peptide
RPSSPRVEDL

SEQ ID NO: 2286 - protein, 9 aa, Artificial Sequence
  Artifcially synthesized peptide
RPSSPSTSW

SEQ ID NO: 2287 - protein, 9 aa, Artificial Sequence
  Artifcially synthesized peptide
RPSSRAVLY

SEQ ID NO: 2288 - protein, 11 aa, Artificial Sequence
  Artifcially synthesized peptide
RPSSRVALMVL

SEQ ID NO: 2289 - protein, 10 aa, Artificial Sequence
  Artifcially synthesized peptide
RPSSVLIEQL

SEQ ID NO: 2290 - protein, 9 aa, Artificial Sequence
  Artifcially synthesized peptide
RPSTPGLSV

SEQ ID NO: 2291 - protein, 10 aa, Artificial Sequence
  Artifcially synthesized peptide
RPSTPHTITL

SEQ ID NO: 2292 - protein, 11 aa, Artificial Sequence
  Artifcially synthesized peptide
RPSTPKSDSEF

SEQ ID NO: 2293 - protein, 11 aa, Artificial Sequence
  Artifcially synthesized peptide
RPSTPKSDSEL

SEQ ID NO: 2294 - protein, 11 aa, Artificial Sequence
  Artifcially synthesized peptide
RPSTPKSDSEM

SEQ ID NO: 2295 - protein, 11 aa, Artificial Sequence
  Artifcially synthesized peptide
RPSTPKSDSEV

SEQ ID NO: 2296 - protein, 10 aa, Artificial Sequence
  Artifcially synthesized peptide
RPSTPSRLAL

SEQ ID NO: 2297 - protein, 10 aa, Artificial Sequence
  Artifcially synthesized peptide
RPTKIGRRSL

SEQ ID NO: 2298 - protein, 9 aa, Artificial Sequence
  Artifcially synthesized peptide
RPTSFADEL

SEQ ID NO: 2299 - protein, 10 aa, Artificial Sequence
  Artifcially synthesized peptide
RPTSISWDGL

SEQ ID NO: 2300 - protein, 9 aa, Artificial Sequence
  Artifcially synthesized peptide
RPTSPIQIM

SEQ ID NO: 2301 - protein, 9 aa, Artificial Sequence
  Artifcially synthesized peptide
RPTSRLNRF

SEQ ID NO: 2302 - protein, 9 aa, Artificial Sequence
  Artifcially synthesized peptide
RPTSRLNRL

SEQ ID NO: 2303 - protein, 10 aa, Artificial Sequence
  Artifcially synthesized peptide
RPTSRLNRLP

SEQ ID NO: 2304 - protein, 9 aa, Artificial Sequence
  Artifcially synthesized peptide
RPTSRLNRM

SEQ ID NO: 2305 - protein, 9 aa, Artificial Sequence
  Artifcially synthesized peptide
RPTSRLNRV

SEQ ID NO: 2306 - protein, 10 aa, Artificial Sequence
  Artifcially synthesized peptide
RPVDPRRRSL

SEQ ID NO: 2307 - protein, 9 aa, Artificial Sequence
  Artifcially synthesized peptide
RPVSPAGPP

SEQ ID NO: 2308 - protein, 9 aa, Artificial Sequence
  Artifcially synthesized peptide
RPVSPAPGA

SEQ ID NO: 2309 - protein, 9 aa, Artificial Sequence
  Artifcially synthesized peptide
RPVSPFQEF

SEQ ID NO: 2310 - protein, 9 aa, Artificial Sequence
  Artifcially synthesized peptide
RPVSPFQEL

SEQ ID NO: 2311 - protein, 9 aa, Artificial Sequence
  Artifcially synthesized peptide
RPVSPFQEM

SEQ ID NO: 2312 - protein, 9 aa, Artificial Sequence
  Artifcially synthesized peptide
RPVSPFQEV

SEQ ID NO: 2313 - protein, 9 aa, Artificial Sequence
  Artifcially synthesized peptide
RPVSPGKDF

SEQ ID NO: 2314 - protein, 9 aa, Artificial Sequence
  Artifcially synthesized peptide
RPVSPGKDI

SEQ ID NO: 2315 - protein, 11 aa, Artificial Sequence
  Artifcially synthesized peptide
RPVSPGKDITA

SEQ ID NO: 2316 - protein, 9 aa, Artificial Sequence
  Artifcially synthesized peptide
RPVSPGKDL

SEQ ID NO: 2317 - protein, 9 aa, Artificial Sequence
  Artifcially synthesized peptide
RPVSPGKDM

SEQ ID NO: 2318 - protein, 9 aa, Artificial Sequence
  Artifcially synthesized peptide
RPVSPGKDV

SEQ ID NO: 2319 - protein, 9 aa, Artificial Sequence
  Artifcially synthesized peptide
RPVSPHSDF

SEQ ID NO: 2320 - protein, 9 aa, Artificial Sequence
  Artifcially synthesized peptide
RPVSPPQKA

SEQ ID NO: 2321 - protein, 9 aa, Artificial Sequence
  Artifcially synthesized peptide
RPVSPSAYM

SEQ ID NO: 2322 - protein, 9 aa, Artificial Sequence
  Artifcially synthesized peptide
RPVSPSSLL

SEQ ID NO: 2323 - protein, 9 aa, Artificial Sequence
  Artifcially synthesized peptide
RPVSPSSLL

SEQ ID NO: 2324 - protein, 10 aa, Artificial Sequence
  Artifcially synthesized peptide
RPVSTDFAQY

SEQ ID NO: 2325 - protein, 10 aa, Artificial Sequence
  Artifcially synthesized peptide
RPVTASITTM

SEQ ID NO: 2326 - protein, 9 aa, Artificial Sequence
  Artifcially synthesized peptide
RPVTPITNF

SEQ ID NO: 2327 - protein, 9 aa, Artificial Sequence
  Artifcially synthesized peptide
RPVTPPRTA

SEQ ID NO: 2328 - protein, 9 aa, Artificial Sequence
  Artifcially synthesized peptide
RPVTPVSDF

SEQ ID NO: 2329 - protein, 9 aa, Artificial Sequence
  Artifcially synthesized peptide
RPVTPVSDL

SEQ ID NO: 2330 - protein, 9 aa, Artificial Sequence
  Artifcially synthesized peptide
RPVTPVSDL

SEQ ID NO: 2331 - protein, 9 aa, Artificial Sequence
  Artifcially synthesized peptide
RPVTPVSDM

SEQ ID NO: 2332 - protein, 9 aa, Artificial Sequence
  Artifcially synthesized peptide
RPVTPVSDV

SEQ ID NO: 2333 - protein, 9 aa, Artificial Sequence
  Artifcially synthesized peptide
RPWSNSRGL

SEQ ID NO: 2334 - protein, 9 aa, Artificial Sequence
  Artifcially synthesized peptide
RPWSNSRGL

SEQ ID NO: 2335 - protein, 9 aa, Artificial Sequence
  Artifcially synthesized peptide
RPWSPAVSA

SEQ ID NO: 2336 - protein, 9 aa, Artificial Sequence
  Artifcially synthesized peptide
RPWSPAVSA

SEQ ID NO: 2337 - protein, 9 aa, Artificial Sequence
  Artifcially synthesized peptide
RPWSPAVSF

SEQ ID NO: 2338 - protein, 9 aa, Artificial Sequence
  Artifcially synthesized peptide
RPWSPAVSL

SEQ ID NO: 2339 - protein, 9 aa, Artificial Sequence
  Artifcially synthesized peptide
RPWSPAVSM

SEQ ID NO: 2340 - protein, 9 aa, Artificial Sequence
  Artifcially synthesized peptide
RPWSPAVSV

SEQ ID NO: 2341 - protein, 11 aa, Artificial Sequence
  Artifcially synthesized peptide
RPWSPPPTGSL

SEQ ID NO: 2342 - protein, 10 aa, Artificial Sequence
  Artifcially synthesized peptide
RPYPSPGAVL

SEQ ID NO: 2343 - protein, 8 aa, Artificial Sequence
  Artifcially synthesized peptide
RPYSPPFF

SEQ ID NO: 2344 - protein, 10 aa, Artificial Sequence
  Artifcially synthesized peptide
RPYSPPFFSF

SEQ ID NO: 2345 - protein, 10 aa, Artificial Sequence
  Artifcially synthesized peptide
RPYSPPFFSL

SEQ ID NO: 2346 - protein, 10 aa, Artificial Sequence
  Artifcially synthesized peptide
RPYSPPFFSM

SEQ ID NO: 2347 - protein, 10 aa, Artificial Sequence
  Artifcially synthesized peptide
RPYSPPFFSV

SEQ ID NO: 2348 - protein, 10 aa, Artificial Sequence
  Artifcially synthesized peptide
RPYSPSEYAL

SEQ ID NO: 2349 - protein, 10 aa, Artificial Sequence
  Artifcially synthesized peptide
RPYSPSQYAL

SEQ ID NO: 2350 - protein, 9 aa, Artificial Sequence
  Artifcially synthesized peptide
RPYSQVNVL

SEQ ID NO: 2351 - protein, 10 aa, Artificial Sequence
  Artifcially synthesized peptide
RPYTNKVITL

SEQ ID NO: 2352 - protein, 10 aa, Artificial Sequence
  Artifcially synthesized peptide
RQASIELPSM

SEQ ID NO: 2353 - protein, 12 aa, Artificial Sequence
  Artifcially synthesized peptide
RQASIELPSMAV

SEQ ID NO: 2354 - protein, 13 aa, Artificial Sequence
  Artifcially synthesized peptide
RQASIELPSMAVA

SEQ ID NO: 2355 - protein, 10 aa, Artificial Sequence
  Artifcially synthesized peptide
RQASIELPSV

SEQ ID NO: 2356 - protein, 9 aa, Artificial Sequence
  Artifcially synthesized peptide
RQASLSISV

SEQ ID NO: 2357 - protein, 9 aa, Artificial Sequence
  Artifcially synthesized peptide
RQASPLVHK

SEQ ID NO: 2358 - protein, 9 aa, Artificial Sequence
  Artifcially synthesized peptide
RQASPLVHR

SEQ ID NO: 2359 - protein, 9 aa, Artificial Sequence
  Artifcially synthesized peptide
RQASPLVHY

SEQ ID NO: 2360 - protein, 9 aa, Artificial Sequence
  Artifcially synthesized peptide
RQASPPRRL

SEQ ID NO: 2361 - protein, 11 aa, Artificial Sequence
  Artifcially synthesized peptide
RQDSTPGKVFL

SEQ ID NO: 2362 - protein, 11 aa, Artificial Sequence
  Artifcially synthesized peptide
RQDSTPGKVFL

SEQ ID NO: 2363 - protein, 11 aa, Artificial Sequence
  Artifcially synthesized peptide
RQDSTPGKVFV

SEQ ID NO: 2364 - protein, 9 aa, Artificial Sequence
  Artifcially synthesized peptide
RQFMRRTSL

SEQ ID NO: 2365 - protein, 9 aa, Artificial Sequence
  Artifcially synthesized peptide
RQISTSGEL

SEQ ID NO: 2366 - protein, 9 aa, Artificial Sequence
  Artifcially synthesized peptide
RQISTSGEL

SEQ ID NO: 2367 - protein, 9 aa, Artificial Sequence
  Artifcially synthesized peptide
RQISTSGEL

SEQ ID NO: 2368 - protein, 9 aa, Artificial Sequence
  Artifcially synthesized peptide
RQISFKAEV

SEQ ID NO: 2369 - protein, 9 aa, Artificial Sequence
  Artifcially synthesized peptide
RQISQDVKL

SEQ ID NO: 2370 - protein, 9 aa, Artificial Sequence
  Artifcially synthesized peptide
RQISQDVKV

SEQ ID NO: 2371 - protein, 9 aa, Artificial Sequence
  Artifcially synthesized peptide
RQKSPLFQF

SEQ ID NO: 2372 - protein, 9 aa, Artificial Sequence
  Artifcially synthesized peptide
RQLSALHRA

SEQ ID NO: 2373 - protein, 12 aa, Artificial Sequence
  Artifcially synthesized peptide
RQLSLEGSGLGV

SEQ ID NO: 2374 - protein, 10 aa, Artificial Sequence
  Artifcially synthesized peptide
RQLSSGVSEI

SEQ ID NO: 2375 - protein, 10 aa, Artificial Sequence
  Artifcially synthesized peptide
RQLSSGVSEV

SEQ ID NO: 2376 - protein, 10 aa, Artificial Sequence
  Artifcially synthesized peptide
RQMSGAQIKI

SEQ ID NO: 2377 - protein, 9 aa, Artificial Sequence
  Artifcially synthesized peptide
RQMSRFKEA

SEQ ID NO: 2378 - protein, 9 aa, Artificial Sequence
  Artifcially synthesized peptide
RQPSEEEII

SEQ ID NO: 2379 - protein, 11 aa, Artificial Sequence
  Artifcially synthesized peptide
RQPSEEEIIKL

SEQ ID NO: 2380 - protein, 10 aa, Artificial Sequence
  Artifcially synthesized peptide
RQPSIELPSM

SEQ ID NO: 2381 - protein, 9 aa, Artificial Sequence
  Artifcially synthesized peptide
RQPSLAKRV

SEQ ID NO: 2382 - protein, 9 aa, Artificial Sequence
  Artifcially synthesized peptide
RQPSLKRSL

SEQ ID NO: 2383 - protein, 9 aa, Artificial Sequence
  Artifcially synthesized peptide
RQSSFEPEF

SEQ ID NO: 2384 - protein, 9 aa, Artificial Sequence
  Artifcially synthesized peptide
RQSSSRFNL

SEQ ID NO: 2385 - protein, 9 aa, Artificial Sequence
  Artifcially synthesized peptide
RQYSVTDAL

SEQ ID NO: 2386 - protein, 9 aa, Artificial Sequence
  Artifcially synthesized peptide
RRSSIQSTF

SEQ ID NO: 2387 - protein, 9 aa, Artificial Sequence
  Artifcially synthesized peptide
RRSSQSWSL

SEQ ID NO: 2388 - protein, 9 aa, Artificial Sequence
  Artifcially synthesized peptide
RRSSIQSTF

SEQ ID NO: 2389 - protein, 9 aa, Artificial Sequence
  Artifcially synthesized peptide
RRSSYLLAI

SEQ ID NO: 2390 - protein, 9 aa, Artificial Sequence
  Artifcially synthesized peptide
RRASFAKSF

SEQ ID NO: 2391 - protein, 9 aa, Artificial Sequence
  Artifcially synthesized peptide
RRASFAKSK

SEQ ID NO: 2392 - protein, 9 aa, Artificial Sequence
  Artifcially synthesized peptide
RRASFAKSL

SEQ ID NO: 2393 - protein, 9 aa, Artificial Sequence
  Artifcially synthesized peptide
RRASFAKSM

SEQ ID NO: 2394 - protein, 9 aa, Artificial Sequence
  Artifcially synthesized peptide
RRASFAKSR

SEQ ID NO: 2395 - protein, 9 aa, Artificial Sequence
  Artifcially synthesized peptide
RRASIITKY

SEQ ID NO: 2396 - protein, 10 aa, Artificial Sequence
  Artifcially synthesized peptide
RRASLSEIGF

SEQ ID NO: 2397 - protein, 10 aa, Artificial Sequence
  Artifcially synthesized peptide
RRASLSEIGK

SEQ ID NO: 2398 - protein, 10 aa, Artificial Sequence
  Artifcially synthesized peptide
RRASLSEIGY

SEQ ID NO: 2399 - protein, 9 aa, Artificial Sequence
  Artifcially synthesized peptide
RRASLSYSF

SEQ ID NO: 2400 - protein, 9 aa, Artificial Sequence
  Artifcially synthesized peptide
RRASQEANL

SEQ ID NO: 2401 - protein, 9 aa, Artificial Sequence
  Artifcially synthesized peptide
RRASSPFRF

SEQ ID NO: 2402 - protein, 9 aa, Artificial Sequence
  Artifcially synthesized peptide
RRASSPFRK

SEQ ID NO: 2403 - protein, 9 aa, Artificial Sequence
  Artifcially synthesized peptide
RRASSPFRL

SEQ ID NO: 2404 - protein, 9 aa, Artificial Sequence
  Artifcially synthesized peptide
RRASSPFRM

SEQ ID NO: 2405 - protein, 9 aa, Artificial Sequence
  Artifcially synthesized peptide
RRASSPFRR

SEQ ID NO: 2406 - protein, 9 aa, Artificial Sequence
  Artifcially synthesized peptide
RRASVFVKF

SEQ ID NO: 2407 - protein, 9 aa, Artificial Sequence
  Artifcially synthesized peptide
RRASVFVKK

SEQ ID NO: 2408 - protein, 9 aa, Artificial Sequence
  Artifcially synthesized peptide
RRASVFVKL

SEQ ID NO: 2409 - protein, 9 aa, Artificial Sequence
  Artifcially synthesized peptide
RRASVFVKM

SEQ ID NO: 2410 - protein, 9 aa, Artificial Sequence
  Artifcially synthesized peptide
RRASVFVKR

SEQ ID NO: 2411 - protein, 9 aa, Artificial Sequence
  Artifcially synthesized peptide
RRDSIVAEF

SEQ ID NO: 2412 - protein, 9 aa, Artificial Sequence
  Artifcially synthesized peptide
RRDSIVAEK

SEQ ID NO: 2413 - protein, 9 aa, Artificial Sequence
  Artifcially synthesized peptide
RRDSIVAEL

SEQ ID NO: 2414 - protein, 9 aa, Artificial Sequence
  Artifcially synthesized peptide
RRDSIVAER

SEQ ID NO: 2415 - protein, 9 aa, Artificial Sequence
  Artifcially synthesized peptide
RRDSIVAEY

SEQ ID NO: 2416 - protein, 10 aa, Artificial Sequence
  Artifcially synthesized peptide
RRDSLQKPGL

SEQ ID NO: 2417 - protein, 9 aa, Artificial Sequence
  Artifcially synthesized peptide
RRFSTEYEL

SEQ ID NO: 2418 - protein, 9 aa, Artificial Sequence
  Artifcially synthesized peptide
RRFSDFLGL

SEQ ID NO: 2419 - protein, 7 aa, Artificial Sequence
  Artifcially synthesized peptide
RRFSFKF

SEQ ID NO: 2420 - protein, 7 aa, Artificial Sequence
  Artifcially synthesized peptide
RRFSFKK

SEQ ID NO: 2421 - protein, 9 aa, Artificial Sequence
  Artifcially synthesized peptide
RRFSFKKSF

SEQ ID NO: 2422 - protein, 9 aa, Artificial Sequence
  Artifcially synthesized peptide
RRFSFKKSK

SEQ ID NO: 2423 - protein, 9 aa, Artificial Sequence
  Artifcially synthesized peptide
RRFSFKKSL

SEQ ID NO: 2424 - protein, 9 aa, Artificial Sequence
  Artifcially synthesized peptide
RRFSFKKSM

SEQ ID NO: 2425 - protein, 9 aa, Artificial Sequence
  Artifcially synthesized peptide
RRFSFKKSR

SEQ ID NO: 2426 - protein, 7 aa, Artificial Sequence
  Artifcially synthesized peptide
RRFSFKL

SEQ ID NO: 2427 - protein, 7 aa, Artificial Sequence
  Artifcially synthesized peptide
RRFSFKM

SEQ ID NO: 2428 - protein, 7 aa, Artificial Sequence
  Artifcially synthesized peptide
RRFSFKR

SEQ ID NO: 2429 - protein, 10 aa, Artificial Sequence
  Artifcially synthesized peptide
RRFSFSGNTL

SEQ ID NO: 2430 - protein, 8 aa, Artificial Sequence
  Artifcially synthesized peptide
RRFSGLLN

SEQ ID NO: 2431 - protein, 9 aa, Artificial Sequence
  Artifcially synthesized peptide
RRFSGLLNC

SEQ ID NO: 2432 - protein, 9 aa, Artificial Sequence
  Artifcially synthesized peptide
RRFSGTAVY

SEQ ID NO: 2433 - protein, 9 aa, Artificial Sequence
  Artifcially synthesized peptide
RRFSGTVRF

SEQ ID NO: 2434 - protein, 9 aa, Artificial Sequence
  Artifcially synthesized peptide
RRFSGTVRK

SEQ ID NO: 2435 - protein, 9 aa, Artificial Sequence
  Artifcially synthesized peptide
RRFSGTVRL

SEQ ID NO: 2436 - protein, 9 aa, Artificial Sequence
  Artifcially synthesized peptide
RRFSGTVRM

SEQ ID NO: 2437 - protein, 9 aa, Artificial Sequence
  Artifcially synthesized peptide
RRFSGTVRR

SEQ ID NO: 2438 - protein, 9 aa, Artificial Sequence
  Artifcially synthesized peptide
RRFSIATLR

SEQ ID NO: 2439 - protein, 9 aa, Artificial Sequence
  Artifcially synthesized peptide
RRFSLSPSL

SEQ ID NO: 2440 - protein, 9 aa, Artificial Sequence
  Artifcially synthesized peptide
RRFSLTTLR

SEQ ID NO: 2441 - protein, 11 aa, Artificial Sequence
  Artifcially synthesized peptide
RRFSLTTLRNF

SEQ ID NO: 2442 - protein, 11 aa, Artificial Sequence
  Artifcially synthesized peptide
RRFSLTTLRNY

SEQ ID NO: 2443 - protein, 11 aa, Artificial Sequence
  Artifcially synthesized peptide
RRFSPDDKYSF

SEQ ID NO: 2444 - protein, 11 aa, Artificial Sequence
  Artifcially synthesized peptide
RRFSPDDKYSK

SEQ ID NO: 2445 - protein, 11 aa, Artificial Sequence
  Artifcially synthesized peptide
RRFSPDDKYSL

SEQ ID NO: 2446 - protein, 11 aa, Artificial Sequence
  Artifcially synthesized peptide
RRFSPDDKYSM

SEQ ID NO: 2447 - protein, 11 aa, Artificial Sequence
  Artifcially synthesized peptide
RRFSPDDKYSR

SEQ ID NO: 2448 - protein, 9 aa, Artificial Sequence
  Artifcially synthesized peptide
RRFSPPRRF

SEQ ID NO: 2449 - protein, 9 aa, Artificial Sequence
  Artifcially synthesized peptide
RRFSPPRRK

SEQ ID NO: 2450 - protein, 9 aa, Artificial Sequence
  Artifcially synthesized peptide
RRFSPPRRL

SEQ ID NO: 2451 - protein, 9 aa, Artificial Sequence
  Artifcially synthesized peptide
RRFSPPRRM

SEQ ID NO: 2452 - protein, 10 aa, Artificial Sequence
  Artifcially synthesized peptide
RRFSPPRRML

SEQ ID NO: 2453 - protein, 9 aa, Artificial Sequence
  Artifcially synthesized peptide
RRFSPPRRR

SEQ ID NO: 2454 - protein, 9 aa, Artificial Sequence
  Artifcially synthesized peptide
RRFSPPRRY

SEQ ID NO: 2455 - protein, 10 aa, Artificial Sequence
  Artifcially synthesized peptide
RRFSRLENRY

SEQ ID NO: 2456 - protein, 9 aa, Artificial Sequence
  Artifcially synthesized peptide
RRFSRSDEL

SEQ ID NO: 2457 - protein, 9 aa, Artificial Sequence
  Artifcially synthesized peptide
RRFSRSPIF

SEQ ID NO: 2458 - protein, 9 aa, Artificial Sequence
  Artifcially synthesized peptide
RRFSRSPIK

SEQ ID NO: 2459 - protein, 9 aa, Artificial Sequence
  Artifcially synthesized peptide
RRFSRSPIL

SEQ ID NO: 2460 - protein, 9 aa, Artificial Sequence
  Artifcially synthesized peptide
RRFSRSPIM

SEQ ID NO: 2461 - protein, 9 aa, Artificial Sequence
  Artifcially synthesized peptide
RRFSRSPIR

SEQ ID NO: 2462 - protein, 10 aa, Artificial Sequence
  Artifcially synthesized peptide
RRFSRSPIRF

SEQ ID NO: 2463 - protein, 10 aa, Artificial Sequence
  Artifcially synthesized peptide
RRFSRSPIRK

SEQ ID NO: 2464 - protein, 10 aa, Artificial Sequence
  Artifcially synthesized peptide
RRFSRSPIRL

SEQ ID NO: 2465 - protein, 10 aa, Artificial Sequence
  Artifcially synthesized peptide
RRFSRSPIRR

SEQ ID NO: 2466 - protein, 10 aa, Artificial Sequence
  Artifcially synthesized peptide
RRFSRSPIRY

SEQ ID NO: 2467 - protein, 9 aa, Artificial Sequence
  Artifcially synthesized peptide
RRFSRSPIY

SEQ ID NO: 2468 - protein, 8 aa, Artificial Sequence
  Artifcially synthesized peptide
RRFSRSPK

SEQ ID NO: 2469 - protein, 11 aa, Artificial Sequence
  Artifcially synthesized peptide
RRFSSSDFSDL

SEQ ID NO: 2470 - protein, 9 aa, Artificial Sequence
  Artifcially synthesized peptide
RRFSSYSQM

SEQ ID NO: 2471 - protein, 9 aa, Artificial Sequence
  Artifcially synthesized peptide
RRFSVSTLR

SEQ ID NO: 2472 - protein, 11 aa, Artificial Sequence
  Artifcially synthesized peptide
RRFSVSTLRNL

SEQ ID NO: 2473 - protein, 13 aa, Artificial Sequence
  Artifcially synthesized peptide
RRFSVSTLRNLGL

SEQ ID NO: 2474 - protein, 14 aa, Artificial Sequence
  Artifcially synthesized peptide
RRFSVSTLRNLGLG

SEQ ID NO: 2475 - protein, 15 aa, Artificial Sequence
  Artifcially synthesized peptide
RRFSVSTLRNLGLGK

SEQ ID NO: 2476 - protein, 9 aa, Artificial Sequence
  Artifcially synthesized peptide
RRFSVTLRL

SEQ ID NO: 2477 - protein, 9 aa, Artificial Sequence
  Artifcially synthesized peptide
RRFSVTTMR

SEQ ID NO: 2478 - protein, 9 aa, Artificial Sequence
  Artifcially synthesized peptide
RRFTEIYEF

SEQ ID NO: 2479 - protein, 10 aa, Artificial Sequence
  Artifcially synthesized peptide
RRFTPPSPAF

SEQ ID NO: 2480 - protein, 10 aa, Artificial Sequence
  Artifcially synthesized peptide
RRFTPPSPAK

SEQ ID NO: 2481 - protein, 10 aa, Artificial Sequence
  Artifcially synthesized peptide
RRFTPPSPAR

SEQ ID NO: 2482 - protein, 10 aa, Artificial Sequence
  Artifcially synthesized peptide
RRFTPPSPAY

SEQ ID NO: 2483 - protein, 9 aa, Artificial Sequence
  Artifcially synthesized peptide
RRGSFEVTL

SEQ ID NO: 2484 - protein, 10 aa, Artificial Sequence
  Artifcially synthesized peptide
RRGSFEVTLL

SEQ ID NO: 2485 - protein, 9 aa, Artificial Sequence
  Artifcially synthesized peptide
RRGSFPLAA

SEQ ID NO: 2486 - protein, 9 aa, Artificial Sequence
  Artifcially synthesized peptide
RRGSGPEIF

SEQ ID NO: 2487 - protein, 10 aa, Artificial Sequence
  Artifcially synthesized peptide
RRGSGPEIFT

SEQ ID NO: 2488 - protein, 11 aa, Artificial Sequence
  Artifcially synthesized peptide
RRGSGPEIFTF

SEQ ID NO: 2489 - protein, 9 aa, Artificial Sequence
  Artifcially synthesized peptide
RRGSLLGSM

SEQ ID NO: 2490 - protein, 9 aa, Artificial Sequence
  Artifcially synthesized peptide
RRGSLTLTI

SEQ ID NO: 2491 - protein, 9 aa, Artificial Sequence
  Artifcially synthesized peptide
RRGSNVALM

SEQ ID NO: 2492 - protein, 9 aa, Artificial Sequence
  Artifcially synthesized peptide
RRGSPVRQL

SEQ ID NO: 2493 - protein, 10 aa, Artificial Sequence
  Artifcially synthesized peptide
RRGSYPFIDF

SEQ ID NO: 2494 - protein, 11 aa, Artificial Sequence
  Artifcially synthesized peptide
RRHSASNLHAL

SEQ ID NO: 2495 - protein, 9 aa, Artificial Sequence
  Artifcially synthesized peptide
RRHSLENKV

SEQ ID NO: 2496 - protein, 10 aa, Artificial Sequence
  Artifcially synthesized peptide
RRIDISPSTF

SEQ ID NO: 2497 - protein, 12 aa, Artificial Sequence
  Artifcially synthesized peptide
RRIDISPSTFRK

SEQ ID NO: 2498 - protein, 10 aa, Artificial Sequence
  Artifcially synthesized peptide
RRIDISPSTK

SEQ ID NO: 2499 - protein, 10 aa, Artificial Sequence
  Artifcially synthesized peptide
RRIDISPSTL

SEQ ID NO: 2500 - protein, 11 aa, Artificial Sequence
  Artifcially synthesized peptide
RRIDISPSTLR

SEQ ID NO: 2501 - protein, 12 aa, Artificial Sequence
  Artifcially synthesized peptide
RRIDISPSTLRK

SEQ ID NO: 2502 - protein, 10 aa, Artificial Sequence
  Artifcially synthesized peptide
RRIDISPSTR

SEQ ID NO: 2503 - protein, 10 aa, Artificial Sequence
  Artifcially synthesized peptide
RRIDISPSTY

SEQ ID NO: 2504 - protein, 9 aa, Artificial Sequence
  Artifcially synthesized peptide
RRISDPEVF

SEQ ID NO: 2505 - protein, 9 aa, Artificial Sequence
  Artifcially synthesized peptide
RRISDPQVF

SEQ ID NO: 2506 - protein, 9 aa, Artificial Sequence
  Artifcially synthesized peptide
RRISGVDRF

SEQ ID NO: 2507 - protein, 9 aa, Artificial Sequence
  Artifcially synthesized peptide
RRISGVDRK

SEQ ID NO: 2508 - protein, 9 aa, Artificial Sequence
  Artifcially synthesized peptide
RRISGVDRL

SEQ ID NO: 2509 - protein, 9 aa, Artificial Sequence
  Artifcially synthesized peptide
RRISGVDRM

SEQ ID NO: 2510 - protein, 9 aa, Artificial Sequence
  Artifcially synthesized peptide
RRISGVDRR

SEQ ID NO: 2511 - protein, 9 aa, Artificial Sequence
  Artifcially synthesized peptide
RRISGVDRY

SEQ ID NO: 2512 - protein, 10 aa, Artificial Sequence
  Artifcially synthesized peptide
RRISGVDRYF

SEQ ID NO: 2513 - protein, 10 aa, Artificial Sequence
  Artifcially synthesized peptide
RRISGVDRYK

SEQ ID NO: 2514 - protein, 10 aa, Artificial Sequence
  Artifcially synthesized peptide
RRISGVDRYK

SEQ ID NO: 2515 - protein, 10 aa, Artificial Sequence
  Artifcially synthesized peptide
RRISGVDRYL

SEQ ID NO: 2516 - protein, 10 aa, Artificial Sequence
  Artifcially synthesized peptide
RRISGVDRYR

SEQ ID NO: 2517 - protein, 10 aa, Artificial Sequence
  Artifcially synthesized peptide
RRISGVDRYY

SEQ ID NO: 2518 - protein, 9 aa, Artificial Sequence
  Artifcially synthesized peptide
RRISIGSLF

SEQ ID NO: 2519 - protein, 9 aa, Artificial Sequence
  Artifcially synthesized peptide
RRISLTKRL

SEQ ID NO: 2520 - protein, 9 aa, Artificial Sequence
  Artifcially synthesized peptide
RRISQIQQL

SEQ ID NO: 2521 - protein, 9 aa, Artificial Sequence
  Artifcially synthesized peptide
RRISVFKYV

SEQ ID NO: 2522 - protein, 9 aa, Artificial Sequence
  Artifcially synthesized peptide
RRISVTSKV

SEQ ID NO: 2523 - protein, 9 aa, Artificial Sequence
  Artifcially synthesized peptide
RRKSDDVHL

SEQ ID NO: 2524 - protein, 9 aa, Artificial Sequence
  Artifcially synthesized peptide
RRKSLVLKF

SEQ ID NO: 2525 - protein, 9 aa, Artificial Sequence
  Artifcially synthesized peptide
RRKSPPPSF

SEQ ID NO: 2526 - protein, 9 aa, Artificial Sequence
  Artifcially synthesized peptide
RRKSPPPSK

SEQ ID NO: 2527 - protein, 9 aa, Artificial Sequence
  Artifcially synthesized peptide
RRKSPPPSL

SEQ ID NO: 2528 - protein, 9 aa, Artificial Sequence
  Artifcially synthesized peptide
RRKSPPPSM

SEQ ID NO: 2529 - protein, 9 aa, Artificial Sequence
  Artifcially synthesized peptide
RRKSPPPSR

SEQ ID NO: 2530 - protein, 9 aa, Artificial Sequence
  Artifcially synthesized peptide
RRKSQLDSF

SEQ ID NO: 2531 - protein, 9 aa, Artificial Sequence
  Artifcially synthesized peptide
RRKSQLDSK

SEQ ID NO: 2532 - protein, 9 aa, Artificial Sequence
  Artifcially synthesized peptide
RRKSQLDSL

SEQ ID NO: 2533 - protein, 9 aa, Artificial Sequence
  Artifcially synthesized peptide
RRKSQLDSM

SEQ ID NO: 2534 - protein, 9 aa, Artificial Sequence
  Artifcially synthesized peptide
RRKSQLDSR

SEQ ID NO: 2535 - protein, 9 aa, Artificial Sequence
  Artifcially synthesized peptide
RRKSQLDSY

SEQ ID NO: 2536 - protein, 9 aa, Artificial Sequence
  Artifcially synthesized peptide
RRKSQVAEF

SEQ ID NO: 2537 - protein, 9 aa, Artificial Sequence
  Artifcially synthesized peptide
RRKSQVAEK

SEQ ID NO: 2538 - protein, 9 aa, Artificial Sequence
  Artifcially synthesized peptide
RRKSQVAEL

SEQ ID NO: 2539 - protein, 9 aa, Artificial Sequence
  Artifcially synthesized peptide
RRKSQVAEM

SEQ ID NO: 2540 - protein, 9 aa, Artificial Sequence
  Artifcially synthesized peptide
RRKSQVAER

SEQ ID NO: 2541 - protein, 9 aa, Artificial Sequence
  Artifcially synthesized peptide
RRKSQVAEV

SEQ ID NO: 2542 - protein, 9 aa, Artificial Sequence
  Artifcially synthesized peptide
RRKSQVAEY

SEQ ID NO: 2543 - protein, 9 aa, Artificial Sequence
  Artifcially synthesized peptide
RRLGSPHRF

SEQ ID NO: 2544 - protein, 9 aa, Artificial Sequence
  Artifcially synthesized peptide
RRLGSPHRK

SEQ ID NO: 2545 - protein, 9 aa, Artificial Sequence
  Artifcially synthesized peptide
RRLGSPHRL

SEQ ID NO: 2546 - protein, 9 aa, Artificial Sequence
  Artifcially synthesized peptide
RRLGSPHRM

SEQ ID NO: 2547 - protein, 9 aa, Artificial Sequence
  Artifcially synthesized peptide
RRLGSPHRR

SEQ ID NO: 2548 - protein, 9 aa, Artificial Sequence
  Artifcially synthesized peptide
RRLSAARLL

SEQ ID NO: 2549 - protein, 9 aa, Artificial Sequence
  Artifcially synthesized peptide
RRLSADIRF

SEQ ID NO: 2550 - protein, 9 aa, Artificial Sequence
  Artifcially synthesized peptide
RRLSADIRK

SEQ ID NO: 2551 - protein, 9 aa, Artificial Sequence
  Artifcially synthesized peptide
RRLSADIRL

SEQ ID NO: 2552 - protein, 9 aa, Artificial Sequence
  Artifcially synthesized peptide
RRLSADIRM

SEQ ID NO: 2553 - protein, 9 aa, Artificial Sequence
  Artifcially synthesized peptide
RRLSADIRR

SEQ ID NO: 2554 - protein, 9 aa, Artificial Sequence
  Artifcially synthesized peptide
RRLSADIRY

SEQ ID NO: 2555 - protein, 9 aa, Artificial Sequence
  Artifcially synthesized peptide
RRLSDSPVF

SEQ ID NO: 2556 - protein, 9 aa, Artificial Sequence
  Artifcially synthesized peptide
RRLSELLRY

SEQ ID NO: 2557 - protein, 9 aa, Artificial Sequence
  Artifcially synthesized peptide
RRLSERETR

SEQ ID NO: 2558 - protein, 9 aa, Artificial Sequence
  Artifcially synthesized peptide
RRLSESSAL

SEQ ID NO: 2559 - protein, 9 aa, Artificial Sequence
  Artifcially synthesized peptide
RRLSFLVSF

SEQ ID NO: 2560 - protein, 9 aa, Artificial Sequence
  Artifcially synthesized peptide
RRLSFLVSK

SEQ ID NO: 2561 - protein, 9 aa, Artificial Sequence
  Artifcially synthesized peptide
RRLSFLVSL

SEQ ID NO: 2562 - protein, 9 aa, Artificial Sequence
  Artifcially synthesized peptide
RRLSFLVSM

SEQ ID NO: 2563 - protein, 9 aa, Artificial Sequence
  Artifcially synthesized peptide
RRLSFLVSR

SEQ ID NO: 2564 - protein, 9 aa, Artificial Sequence
  Artifcially synthesized peptide
RRLSFLVSY

SEQ ID NO: 2565 - protein, 9 aa, Artificial Sequence
  Artifcially synthesized peptide
RRLSFQAEY

SEQ ID NO: 2566 - protein, 10 aa, Artificial Sequence
  Artifcially synthesized peptide
RRLSGELISM

SEQ ID NO: 2567 - protein, 10 aa, Artificial Sequence
  Artifcially synthesized peptide
RRLSGGSHSF

SEQ ID NO: 2568 - protein, 10 aa, Artificial Sequence
  Artifcially synthesized peptide
RRLSGGSHSK

SEQ ID NO: 2569 - protein, 10 aa, Artificial Sequence
  Artifcially synthesized peptide
RRLSGGSHSL

SEQ ID NO: 2570 - protein, 10 aa, Artificial Sequence
  Artifcially synthesized peptide
RRLSGGSHSM

SEQ ID NO: 2571 - protein, 10 aa, Artificial Sequence
  Artifcially synthesized peptide
RRLSGGSHSR

SEQ ID NO: 2572 - protein, 10 aa, Artificial Sequence
  Artifcially synthesized peptide
RRLSGGSHSY

SEQ ID NO: 2573 - protein, 10 aa, Artificial Sequence
  Artifcially synthesized peptide
RRLSGPLHTF

SEQ ID NO: 2574 - protein, 10 aa, Artificial Sequence
  Artifcially synthesized peptide
RRLSGPLHTK

SEQ ID NO: 2575 - protein, 10 aa, Artificial Sequence
  Artifcially synthesized peptide
RRLSGPLHTL

SEQ ID NO: 2576 - protein, 10 aa, Artificial Sequence
  Artifcially synthesized peptide
RRLSGPLHTM

SEQ ID NO: 2577 - protein, 10 aa, Artificial Sequence
  Artifcially synthesized peptide
RRLSGPLHTR

SEQ ID NO: 2578 - protein, 10 aa, Artificial Sequence
  Artifcially synthesized peptide
RRLSGPLHTV

SEQ ID NO: 2579 - protein, 9 aa, Artificial Sequence
  Artifcially synthesized peptide
RRLSLFLNV

SEQ ID NO: 2580 - protein, 9 aa, Artificial Sequence
  Artifcially synthesized peptide
RRLSLFLVL

SEQ ID NO: 2581 - protein, 9 aa, Artificial Sequence
  Artifcially synthesized peptide
RRLSLPGLL

SEQ ID NO: 2582 - protein, 9 aa, Artificial Sequence
  Artifcially synthesized peptide
RRLSLSRSL

SEQ ID NO: 2583 - protein, 9 aa, Artificial Sequence
  Artifcially synthesized peptide
RRLSNLPTF

SEQ ID NO: 2584 - protein, 9 aa, Artificial Sequence
  Artifcially synthesized peptide
RRLSNLPTK

SEQ ID NO: 2585 - protein, 9 aa, Artificial Sequence
  Artifcially synthesized peptide
RRLSNLPTR

SEQ ID NO: 2586 - protein, 9 aa, Artificial Sequence
  Artifcially synthesized peptide
RRLSNLPTV

SEQ ID NO: 2587 - protein, 9 aa, Artificial Sequence
  Artifcially synthesized peptide
RRLSNLPTY

SEQ ID NO: 2588 - protein, 9 aa, Artificial Sequence
  Artifcially synthesized peptide
RRLSPAPQF

SEQ ID NO: 2589 - protein, 9 aa, Artificial Sequence
  Artifcially synthesized peptide
RRLSPAPQK

SEQ ID NO: 2590 - protein, 9 aa, Artificial Sequence
  Artifcially synthesized peptide
RRLSPAPQL

SEQ ID NO: 2591 - protein, 9 aa, Artificial Sequence
  Artifcially synthesized peptide
RRLSPAPQM

SEQ ID NO: 2592 - protein, 9 aa, Artificial Sequence
  Artifcially synthesized peptide
RRLSPAPQR

SEQ ID NO: 2593 - protein, 11 aa, Artificial Sequence
  Artifcially synthesized peptide
RRLSPKASQVF

SEQ ID NO: 2594 - protein, 11 aa, Artificial Sequence
  Artifcially synthesized peptide
RRLSPKASQVK

SEQ ID NO: 2595 - protein, 11 aa, Artificial Sequence
  Artifcially synthesized peptide
RRLSPKASQVL

SEQ ID NO: 2596 - protein, 11 aa, Artificial Sequence
  Artifcially synthesized peptide
RRLSPKASQVM

SEQ ID NO: 2597 - protein, 11 aa, Artificial Sequence
  Artifcially synthesized peptide
RRLSPKASQVR

SEQ ID NO: 2598 - protein, 10 aa, Artificial Sequence
  Artifcially synthesized peptide
RRLSPVPVPF

SEQ ID NO: 2599 - protein, 10 aa, Artificial Sequence
  Artifcially synthesized peptide
RRLSPVPVPK

SEQ ID NO: 2600 - protein, 10 aa, Artificial Sequence
  Artifcially synthesized peptide
RRLSPVPVPL

SEQ ID NO: 2601 - protein, 10 aa, Artificial Sequence
  Artifcially synthesized peptide
RRLSPVPVPM

SEQ ID NO: 2602 - protein, 10 aa, Artificial Sequence
  Artifcially synthesized peptide
RRLSPVPVPR

SEQ ID NO: 2603 - protein, 9 aa, Artificial Sequence
  Artifcially synthesized peptide
RRLSRELQF

SEQ ID NO: 2604 - protein, 9 aa, Artificial Sequence
  Artifcially synthesized peptide
RRLSRELQK

SEQ ID NO: 2605 - protein, 9 aa, Artificial Sequence
  Artifcially synthesized peptide
RRLSRELQL

SEQ ID NO: 2606 - protein, 9 aa, Artificial Sequence
  Artifcially synthesized peptide
RRLSRELQM

SEQ ID NO: 2607 - protein, 9 aa, Artificial Sequence
  Artifcially synthesized peptide
RRLSRELQR

SEQ ID NO: 2608 - protein, 7 aa, Artificial Sequence
  Artifcially synthesized peptide
RRLSRKL

SEQ ID NO: 2609 - protein, 9 aa, Artificial Sequence
  Artifcially synthesized peptide
RRLSRKLSL

SEQ ID NO: 2610 - protein, 9 aa, Artificial Sequence
  Artifcially synthesized peptide
RRLSSQFEN

SEQ ID NO: 2611 - protein, 11 aa, Artificial Sequence
  Artifcially synthesized peptide
RRLSVEIYDKF

SEQ ID NO: 2612 - protein, 9 aa, Artificial Sequence
  Artifcially synthesized peptide
RRLSVERIF

SEQ ID NO: 2613 - protein, 9 aa, Artificial Sequence
  Artifcially synthesized peptide
RRLSVERIK

SEQ ID NO: 2614 - protein, 9 aa, Artificial Sequence
  Artifcially synthesized peptide
RRLSVERIL

SEQ ID NO: 2615 - protein, 9 aa, Artificial Sequence
  Artifcially synthesized peptide
RRLSVERIM

SEQ ID NO: 2616 - protein, 9 aa, Artificial Sequence
  Artifcially synthesized peptide
RRLSVERIR

SEQ ID NO: 2617 - protein, 9 aa, Artificial Sequence
  Artifcially synthesized peptide
RRLSYVLFI

SEQ ID NO: 2618 - protein, 8 aa, Artificial Sequence
  Artifcially synthesized peptide
RRLTHLSF

SEQ ID NO: 2619 - protein, 8 aa, Artificial Sequence
  Artifcially synthesized peptide
RRLTHLSK

SEQ ID NO: 2620 - protein, 8 aa, Artificial Sequence
  Artifcially synthesized peptide
RRLTHLSL

SEQ ID NO: 2621 - protein, 8 aa, Artificial Sequence
  Artifcially synthesized peptide
RRLTHLSM

SEQ ID NO: 2622 - protein, 8 aa, Artificial Sequence
  Artifcially synthesized peptide
RRLTHLSR

SEQ ID NO: 2623 - protein, 9 aa, Artificial Sequence
  Artifcially synthesized peptide
RRLTLHSVF

SEQ ID NO: 2624 - protein, 8 aa, Artificial Sequence
  Artifcially synthesized peptide
RRMSFQKP

SEQ ID NO: 2625 - protein, 10 aa, Artificial Sequence
  Artifcially synthesized peptide
RRMSFSGIFR

SEQ ID NO: 2626 - protein, 9 aa, Artificial Sequence
  Artifcially synthesized peptide
RRMSLLSVF

SEQ ID NO: 2627 - protein, 9 aa, Artificial Sequence
  Artifcially synthesized peptide
RRMSLLSVK

SEQ ID NO: 2628 - protein, 9 aa, Artificial Sequence
  Artifcially synthesized peptide
RRMSLLSVL

SEQ ID NO: 2629 - protein, 9 aa, Artificial Sequence
  Artifcially synthesized peptide
RRMSLLSVM

SEQ ID NO: 2630 - protein, 9 aa, Artificial Sequence
  Artifcially synthesized peptide
RRMSLLSVR

SEQ ID NO: 2631 - protein, 9 aa, Artificial Sequence
  Artifcially synthesized peptide
RRMSLLSVV

SEQ ID NO: 2632 - protein, 9 aa, Artificial Sequence
  Artifcially synthesized peptide
RRMSLLSVY

SEQ ID NO: 2633 - protein, 9 aa, Artificial Sequence
  Artifcially synthesized peptide
RRMSPKAQF

SEQ ID NO: 2634 - protein, 9 aa, Artificial Sequence
  Artifcially synthesized peptide
RRMSPKAQK

SEQ ID NO: 2635 - protein, 9 aa, Artificial Sequence
  Artifcially synthesized peptide
RRMSPKAQL

SEQ ID NO: 2636 - protein, 9 aa, Artificial Sequence
  Artifcially synthesized peptide
RRMSPKAQM

SEQ ID NO: 2637 - protein, 9 aa, Artificial Sequence
  Artifcially synthesized peptide
RRMSPKAQR

SEQ ID NO: 2638 - protein, 8 aa, Artificial Sequence
  Artifcially synthesized peptide
RRMSPKPF

SEQ ID NO: 2639 - protein, 8 aa, Artificial Sequence
  Artifcially synthesized peptide
RRMSPKPK

SEQ ID NO: 2640 - protein, 8 aa, Artificial Sequence
  Artifcially synthesized peptide
RRMSPKPL

SEQ ID NO: 2641 - protein, 8 aa, Artificial Sequence
  Artifcially synthesized peptide
RRMSPKPM

SEQ ID NO: 2642 - protein, 8 aa, Artificial Sequence
  Artifcially synthesized peptide
RRMSPKPR

SEQ ID NO: 2643 - protein, 11 aa, Artificial Sequence
  Artifcially synthesized peptide
RRMSVAEQVDY

SEQ ID NO: 2644 - protein, 10 aa, Artificial Sequence
  Artifcially synthesized peptide
RRMSVGDRAG

SEQ ID NO: 2645 - protein, 9 aa, Artificial Sequence
  Artifcially synthesized peptide
RRNSAPVSV

SEQ ID NO: 2646 - protein, 10 aa, Artificial Sequence
  Artifcially synthesized peptide
RRNSFIGTPY

SEQ ID NO: 2647 - protein, 9 aa, Artificial Sequence
  Artifcially synthesized peptide
RRNSINRNF

SEQ ID NO: 2648 - protein, 10 aa, Artificial Sequence
  Artifcially synthesized peptide
RRNSISLREL

SEQ ID NO: 2649 - protein, 10 aa, Artificial Sequence
  Artifcially synthesized peptide
RRNSKIFLDL

SEQ ID NO: 2650 - protein, 9 aa, Artificial Sequence
  Artifcially synthesized peptide
RRNSLLHGY

SEQ ID NO: 2651 - protein, 11 aa, Artificial Sequence
  Artifcially synthesized peptide
RRNSNPVIAEF

SEQ ID NO: 2652 - protein, 11 aa, Artificial Sequence
  Artifcially synthesized peptide
RRNSNPVIAEK

SEQ ID NO: 2653 - protein, 11 aa, Artificial Sequence
  Artifcially synthesized peptide
RRNSNPVIAEL

SEQ ID NO: 2654 - protein, 11 aa, Artificial Sequence
  Artifcially synthesized peptide
RRNSNPVIAEM

SEQ ID NO: 2655 - protein, 11 aa, Artificial Sequence
  Artifcially synthesized peptide
RRNSNPVIAER

SEQ ID NO: 2656 - protein, 9 aa, Artificial Sequence
  Artifcially synthesized peptide
RRNSSERTF

SEQ ID NO: 2657 - protein, 9 aa, Artificial Sequence
  Artifcially synthesized peptide
RRNSSERTK

SEQ ID NO: 2658 - protein, 9 aa, Artificial Sequence
  Artifcially synthesized peptide
RRNSSERTL

SEQ ID NO: 2659 - protein, 9 aa, Artificial Sequence
  Artifcially synthesized peptide
RRNSSERTM

SEQ ID NO: 2660 - protein, 9 aa, Artificial Sequence
  Artifcially synthesized peptide
RRNSSERTR

SEQ ID NO: 2661 - protein, 9 aa, Artificial Sequence
  Artifcially synthesized peptide
RRNSSERTY

SEQ ID NO: 2662 - protein, 9 aa, Artificial Sequence
  Artifcially synthesized peptide
RRNSSIVGF

SEQ ID NO: 2663 - protein, 9 aa, Artificial Sequence
  Artifcially synthesized peptide
RRNSSIVGK

SEQ ID NO: 2664 - protein, 9 aa, Artificial Sequence
  Artifcially synthesized peptide
RRNSSIVGL

SEQ ID NO: 2665 - protein, 9 aa, Artificial Sequence
  Artifcially synthesized peptide
RRNSSIVGM

SEQ ID NO: 2666 - protein, 9 aa, Artificial Sequence
  Artifcially synthesized peptide
RRNSSIVGR

SEQ ID NO: 2667 - protein, 9 aa, Artificial Sequence
  Artifcially synthesized peptide
RRNSSIVGY

SEQ ID NO: 2668 - protein, 10 aa, Artificial Sequence
  Artifcially synthesized peptide
RRNSVFQQGF

SEQ ID NO: 2669 - protein, 10 aa, Artificial Sequence
  Artifcially synthesized peptide
RRNSVFQQGK

SEQ ID NO: 2670 - protein, 10 aa, Artificial Sequence
  Artifcially synthesized peptide
RRNSVFQQGL

SEQ ID NO: 2671 - protein, 10 aa, Artificial Sequence
  Artifcially synthesized peptide
RRNSVFQQGM

SEQ ID NO: 2672 - protein, 10 aa, Artificial Sequence
  Artifcially synthesized peptide
RRNSVFQQGR

SEQ ID NO: 2673 - protein, 10 aa, Artificial Sequence
  Artifcially synthesized peptide
RRNSVFQQGY

SEQ ID NO: 2674 - protein, 8 aa, Artificial Sequence
  Artifcially synthesized peptide
RRPKTLRL

SEQ ID NO: 2675 - protein, 9 aa, Artificial Sequence
  Artifcially synthesized peptide
RRPSHEGYL

SEQ ID NO: 2676 - protein, 9 aa, Artificial Sequence
  Artifcially synthesized peptide
RRPSIAPVL

SEQ ID NO: 2677 - protein, 9 aa, Artificial Sequence
  Artifcially synthesized peptide
RRPSKPRLI

SEQ ID NO: 2678 - protein, 9 aa, Artificial Sequence
  Artifcially synthesized peptide
RRPSLLSEF

SEQ ID NO: 2679 - protein, 10 aa, Artificial Sequence
  Artifcially synthesized peptide
RRPSLQGNTL

SEQ ID NO: 2680 - protein, 9 aa, Artificial Sequence
  Artifcially synthesized peptide
RRPSLVHGF

SEQ ID NO: 2681 - protein, 9 aa, Artificial Sequence
  Artifcially synthesized peptide
RRPSLVHGK

SEQ ID NO: 2682 - protein, 9 aa, Artificial Sequence
  Artifcially synthesized peptide
RRPSLVHGL

SEQ ID NO: 2683 - protein, 9 aa, Artificial Sequence
  Artifcially synthesized peptide
RRPSLVHGM

SEQ ID NO: 2684 - protein, 9 aa, Artificial Sequence
  Artifcially synthesized peptide
RRPSLVHGR

SEQ ID NO: 2685 - protein, 9 aa, Artificial Sequence
  Artifcially synthesized peptide
RRPSLVHGY

SEQ ID NO: 2686 - protein, 10 aa, Artificial Sequence
  Artifcially synthesized peptide
RRPSQNAISF

SEQ ID NO: 2687 - protein, 11 aa, Artificial Sequence
  Artifcially synthesized peptide
RRPSQNAISFF

SEQ ID NO: 2688 - protein, 9 aa, Artificial Sequence
  Artifcially synthesized peptide
RRPSQPYMF

SEQ ID NO: 2689 - protein, 9 aa, Artificial Sequence
  Artifcially synthesized peptide
RRPSRPHMF

SEQ ID NO: 2690 - protein, 10 aa, Artificial Sequence
  Artifcially synthesized peptide
RRPSRPHMFP

SEQ ID NO: 2691 - protein, 9 aa, Artificial Sequence
  Artifcially synthesized peptide
RRPSVFERF

SEQ ID NO: 2692 - protein, 9 aa, Artificial Sequence
  Artifcially synthesized peptide
RRPSVFERK

SEQ ID NO: 2693 - protein, 9 aa, Artificial Sequence
  Artifcially synthesized peptide
RRPSVFERL

SEQ ID NO: 2694 - protein, 9 aa, Artificial Sequence
  Artifcially synthesized peptide
RRPSVFERM

SEQ ID NO: 2695 - protein, 9 aa, Artificial Sequence
  Artifcially synthesized peptide
RRPSVFERR

SEQ ID NO: 2696 - protein, 9 aa, Artificial Sequence
  Artifcially synthesized peptide
RRPSVFERY

SEQ ID NO: 2697 - protein, 9 aa, Artificial Sequence
  Artifcially synthesized peptide
RRPSYRKIF

SEQ ID NO: 2698 - protein, 9 aa, Artificial Sequence
  Artifcially synthesized peptide
RRPSYRKIK

SEQ ID NO: 2699 - protein, 9 aa, Artificial Sequence
  Artifcially synthesized peptide
RRPSYRKIL

SEQ ID NO: 2700 - protein, 9 aa, Artificial Sequence
  Artifcially synthesized peptide
RRPSYRKIM

SEQ ID NO: 2701 - protein, 9 aa, Artificial Sequence
  Artifcially synthesized peptide
RRPSYRKIR

SEQ ID NO: 2702 - protein, 9 aa, Artificial Sequence
  Artifcially synthesized peptide
RRPSYRKIY

SEQ ID NO: 2703 - protein, 9 aa, Artificial Sequence
  Artifcially synthesized peptide
RRPSYTLGF

SEQ ID NO: 2704 - protein, 9 aa, Artificial Sequence
  Artifcially synthesized peptide
RRPSYTLGK

SEQ ID NO: 2705 - protein, 9 aa, Artificial Sequence
  Artifcially synthesized peptide
RRPSYTLGL

SEQ ID NO: 2706 - protein, 9 aa, Artificial Sequence
  Artifcially synthesized peptide
RRPSYTLGM

SEQ ID NO: 2707 - protein, 9 aa, Artificial Sequence
  Artifcially synthesized peptide
RRPSYTLGR

SEQ ID NO: 2708 - protein, 9 aa, Artificial Sequence
  Artifcially synthesized peptide
RRPSYTLGV

SEQ ID NO: 2709 - protein, 9 aa, Artificial Sequence
  Artifcially synthesized peptide
RRPSYTLGY

SEQ ID NO: 2710 - protein, 9 aa, Artificial Sequence
  Artifcially synthesized peptide
RRQSFAVLR

SEQ ID NO: 2711 - protein, 9 aa, Artificial Sequence
  Artifcially synthesized peptide
RRQSKVEAL

SEQ ID NO: 2712 - protein, 9 aa, Artificial Sequence
  Artifcially synthesized peptide
RRREDSYHV

SEQ ID NO: 2713 - protein, 9 aa, Artificial Sequence
  Artifcially synthesized peptide
RRRSAPPEL

SEQ ID NO: 2714 - protein, 9 aa, Artificial Sequence
  Artifcially synthesized peptide
RRRSAVHML

SEQ ID NO: 2715 - protein, 9 aa, Artificial Sequence
  Artifcially synthesized peptide
RRRSLERLL

SEQ ID NO: 2716 - protein, 7 aa, Artificial Sequence
  Artifcially synthesized peptide
RRSFSLE

SEQ ID NO: 2717 - protein, 9 aa, Artificial Sequence
  Artifcially synthesized peptide
RRSSDIISL

SEQ ID NO: 2718 - protein, 7 aa, Artificial Sequence
  Artifcially synthesized peptide
RRSSFLQ

SEQ ID NO: 2719 - protein, 9 aa, Artificial Sequence
  Artifcially synthesized peptide
RRSSFLQLF

SEQ ID NO: 2720 - protein, 9 aa, Artificial Sequence
  Artifcially synthesized peptide
RRSSFLQVK

SEQ ID NO: 2721 - protein, 9 aa, Artificial Sequence
  Artifcially synthesized peptide
RRSSFLQVL

SEQ ID NO: 2722 - protein, 9 aa, Artificial Sequence
  Artifcially synthesized peptide
RRSSFLQVM

SEQ ID NO: 2723 - protein, 9 aa, Artificial Sequence
  Artifcially synthesized peptide
RRSSFLQVR

SEQ ID NO: 2724 - protein, 9 aa, Artificial Sequence
  Artifcially synthesized peptide
RRSSFLQVV

SEQ ID NO: 2725 - protein, 9 aa, Artificial Sequence
  Artifcially synthesized peptide
RRSSFLQVY

SEQ ID NO: 2726 - protein, 9 aa, Artificial Sequence
  Artifcially synthesized peptide
RRSSIGLRF

SEQ ID NO: 2727 - protein, 9 aa, Artificial Sequence
  Artifcially synthesized peptide
RRSSIGLRK

SEQ ID NO: 2728 - protein, 9 aa, Artificial Sequence
  Artifcially synthesized peptide
RRSSIGLRL

SEQ ID NO: 2729 - protein, 9 aa, Artificial Sequence
  Artifcially synthesized peptide
RRSSIGLRM

SEQ ID NO: 2730 - protein, 9 aa, Artificial Sequence
  Artifcially synthesized peptide
RRSSIGLRR

SEQ ID NO: 2731 - protein, 9 aa, Artificial Sequence
  Artifcially synthesized peptide
RRSSIGLRV

SEQ ID NO: 2732 - protein, 9 aa, Artificial Sequence
  Artifcially synthesized peptide
RRSSIGLRY

SEQ ID NO: 2733 - protein, 9 aa, Artificial Sequence
  Artifcially synthesized peptide
RRSSIPITV

SEQ ID NO: 2734 - protein, 9 aa, Artificial Sequence
  Artifcially synthesized peptide
RRSSIQSTF

SEQ ID NO: 2735 - protein, 9 aa, Artificial Sequence
  Artifcially synthesized peptide
RRSSIQSTK

SEQ ID NO: 2736 - protein, 9 aa, Artificial Sequence
  Artifcially synthesized peptide
RRSSIQSTL

SEQ ID NO: 2737 - protein, 9 aa, Artificial Sequence
  Artifcially synthesized peptide
RRSSIQSTM

SEQ ID NO: 2738 - protein, 9 aa, Artificial Sequence
  Artifcially synthesized peptide
RRSSIQSTR

SEQ ID NO: 2739 - protein, 9 aa, Artificial Sequence
  Artifcially synthesized peptide
RRSSIQSTY

SEQ ID NO: 2740 - protein, 9 aa, Artificial Sequence
  Artifcially synthesized peptide
RRSSISSWL

SEQ ID NO: 2741 - protein, 12 aa, Artificial Sequence
  Artifcially synthesized peptide
RRSSLDAEIDSF

SEQ ID NO: 2742 - protein, 12 aa, Artificial Sequence
  Artifcially synthesized peptide
RRSSLDAEIDSL

SEQ ID NO: 2743 - protein, 12 aa, Artificial Sequence
  Artifcially synthesized peptide
RRSSLDAEIDSM

SEQ ID NO: 2744 - protein, 12 aa, Artificial Sequence
  Artifcially synthesized peptide
RRSSLDAEIDSV

SEQ ID NO: 2745 - protein, 9 aa, Artificial Sequence
  Artifcially synthesized peptide
RRSSLLSLM

SEQ ID NO: 2746 - protein, 9 aa, Artificial Sequence
  Artifcially synthesized peptide
RRSSQSWSF

SEQ ID NO: 2747 - protein, 9 aa, Artificial Sequence
  Artifcially synthesized peptide
RRSSQSWSK

SEQ ID NO: 2748 - protein, 9 aa, Artificial Sequence
  Artifcially synthesized peptide
RRSSQSWSL

SEQ ID NO: 2749 - protein, 9 aa, Artificial Sequence
  Artifcially synthesized peptide
RRSSQSWSM

SEQ ID NO: 2750 - protein, 9 aa, Artificial Sequence
  Artifcially synthesized peptide
RRSSQSWSR

SEQ ID NO: 2751 - protein, 9 aa, Artificial Sequence
  Artifcially synthesized peptide
RRSSQSWSV

SEQ ID NO: 2752 - protein, 9 aa, Artificial Sequence
  Artifcially synthesized peptide
RRSSQSWSY

SEQ ID NO: 2753 - protein, 9 aa, Artificial Sequence
  Artifcially synthesized peptide
RRSSSVAQV

SEQ ID NO: 2754 - protein, 11 aa, Artificial Sequence
  Artifcially synthesized peptide
RRSSTASLVKF

SEQ ID NO: 2755 - protein, 11 aa, Artificial Sequence
  Artifcially synthesized peptide
RRSSTASLVKK

SEQ ID NO: 2756 - protein, 11 aa, Artificial Sequence
  Artifcially synthesized peptide
RRSSTASLVKL

SEQ ID NO: 2757 - protein, 11 aa, Artificial Sequence
  Artifcially synthesized peptide
RRSSTASLVKM

SEQ ID NO: 2758 - protein, 11 aa, Artificial Sequence
  Artifcially synthesized peptide
RRSSTASLVKR

SEQ ID NO: 2759 - protein, 9 aa, Artificial Sequence
  Artifcially synthesized peptide
RRSSVDLGF

SEQ ID NO: 2760 - protein, 9 aa, Artificial Sequence
  Artifcially synthesized peptide
RRSSVDLGK

SEQ ID NO: 2761 - protein, 9 aa, Artificial Sequence
  Artifcially synthesized peptide
RRSSVDLGL

SEQ ID NO: 2762 - protein, 9 aa, Artificial Sequence
  Artifcially synthesized peptide
RRSSVDLGM

SEQ ID NO: 2763 - protein, 9 aa, Artificial Sequence
  Artifcially synthesized peptide
RRSSVDLGR

SEQ ID NO: 2764 - protein, 9 aa, Artificial Sequence
  Artifcially synthesized peptide
RRSSVDLGY

SEQ ID NO: 2765 - protein, 9 aa, Artificial Sequence
  Artifcially synthesized peptide
RRSSVKVEA

SEQ ID NO: 2766 - protein, 9 aa, Artificial Sequence
  Artifcially synthesized peptide
RRSSVKVEF

SEQ ID NO: 2767 - protein, 9 aa, Artificial Sequence
  Artifcially synthesized peptide
RRSSVKVEK

SEQ ID NO: 2768 - protein, 9 aa, Artificial Sequence
  Artifcially synthesized peptide
RRSSVKVEL

SEQ ID NO: 2769 - protein, 9 aa, Artificial Sequence
  Artifcially synthesized peptide
RRSSVKVEM

SEQ ID NO: 2770 - protein, 9 aa, Artificial Sequence
  Artifcially synthesized peptide
RRSSVKVER

SEQ ID NO: 2771 - protein, 9 aa, Artificial Sequence
  Artifcially synthesized peptide
RRSSVKVEY

SEQ ID NO: 2772 - protein, 9 aa, Artificial Sequence
  Artifcially synthesized peptide
RRTSPITRF

SEQ ID NO: 2773 - protein, 9 aa, Artificial Sequence
  Artifcially synthesized peptide
RRTSPITRK

SEQ ID NO: 2774 - protein, 9 aa, Artificial Sequence
  Artifcially synthesized peptide
RRTSPITRL

SEQ ID NO: 2775 - protein, 9 aa, Artificial Sequence
  Artifcially synthesized peptide
RRTSPITRM

SEQ ID NO: 2776 - protein, 9 aa, Artificial Sequence
  Artifcially synthesized peptide
RRTSPITRR

SEQ ID NO: 2777 - protein, 9 aa, Artificial Sequence
  Artifcially synthesized peptide
RRVSIGVQL

SEQ ID NO: 2778 - protein, 8 aa, Artificial Sequence
  Artifcially synthesized peptide
RRVSPLNL

SEQ ID NO: 2779 - protein, 13 aa, Artificial Sequence
  Artifcially synthesized peptide
RRVSPLNLSSVTP

SEQ ID NO: 2780 - protein, 11 aa, Artificial Sequence
  Artifcially synthesized peptide
RRVSSNGIFDL

SEQ ID NO: 2781 - protein, 9 aa, Artificial Sequence
  Artifcially synthesized peptide
RRVVQRSSF

SEQ ID NO: 2782 - protein, 9 aa, Artificial Sequence
  Artifcially synthesized peptide
RRVVQRSSK

SEQ ID NO: 2783 - protein, 9 aa, Artificial Sequence
  Artifcially synthesized peptide
RRVVQRSSL

SEQ ID NO: 2784 - protein, 9 aa, Artificial Sequence
  Artifcially synthesized peptide
RRVVQRSSM

SEQ ID NO: 2785 - protein, 9 aa, Artificial Sequence
  Artifcially synthesized peptide
RRVVQRSSR

SEQ ID NO: 2786 - protein, 9 aa, Artificial Sequence
  Artifcially synthesized peptide
RRVVQRSSY

SEQ ID NO: 2787 - protein, 13 aa, Artificial Sequence
  Artifcially synthesized peptide
RRYSASTVDVIEM

SEQ ID NO: 2788 - protein, 9 aa, Artificial Sequence
  Artifcially synthesized peptide
RRYSDLTTL

SEQ ID NO: 2789 - protein, 9 aa, Artificial Sequence
  Artifcially synthesized peptide
RRYSDPPTY

SEQ ID NO: 2790 - protein, 9 aa, Artificial Sequence
  Artifcially synthesized peptide
RRYSGKTEF

SEQ ID NO: 2791 - protein, 9 aa, Artificial Sequence
  Artifcially synthesized peptide
RRYSGKTEK

SEQ ID NO: 2792 - protein, 9 aa, Artificial Sequence
  Artifcially synthesized peptide
RRYSGKTEL

SEQ ID NO: 2793 - protein, 9 aa, Artificial Sequence
  Artifcially synthesized peptide
RRYSGKTER

SEQ ID NO: 2794 - protein, 9 aa, Artificial Sequence
  Artifcially synthesized peptide
RRYSGKTEY

SEQ ID NO: 2795 - protein, 9 aa, Artificial Sequence
  Artifcially synthesized peptide
RRYSGNMEF

SEQ ID NO: 2796 - protein, 9 aa, Artificial Sequence
  Artifcially synthesized peptide
RRYSGNMEK

SEQ ID NO: 2797 - protein, 9 aa, Artificial Sequence
  Artifcially synthesized peptide
RRYSGNMEL

SEQ ID NO: 2798 - protein, 9 aa, Artificial Sequence
  Artifcially synthesized peptide
RRYSGNMEM

SEQ ID NO: 2799 - protein, 9 aa, Artificial Sequence
  Artifcially synthesized peptide
RRYSGNMER

SEQ ID NO: 2800 - protein, 9 aa, Artificial Sequence
  Artifcially synthesized peptide
RRYSKFFDL

SEQ ID NO: 2801 - protein, 12 aa, Artificial Sequence
  Artifcially synthesized peptide
RRYSLPLKSIYM

SEQ ID NO: 2802 - protein, 9 aa, Artificial Sequence
  Artifcially synthesized peptide
RRYSPPIER

SEQ ID NO: 2803 - protein, 8 aa, Artificial Sequence
  Artifcially synthesized peptide
RRYSPPIQ

SEQ ID NO: 2804 - protein, 9 aa, Artificial Sequence
  Artifcially synthesized peptide
RRYSPPIQF

SEQ ID NO: 2805 - protein, 9 aa, Artificial Sequence
  Artifcially synthesized peptide
RRYSPPIQK

SEQ ID NO: 2806 - protein, 9 aa, Artificial Sequence
  Artifcially synthesized peptide
RRYSPPIQL

SEQ ID NO: 2807 - protein, 9 aa, Artificial Sequence
  Artifcially synthesized peptide
RRYSPPIQM

SEQ ID NO: 2808 - protein, 9 aa, Artificial Sequence
  Artifcially synthesized peptide
RRYSPPIQR

SEQ ID NO: 2809 - protein, 9 aa, Artificial Sequence
  Artifcially synthesized peptide
RRYSPPIQY

SEQ ID NO: 2810 - protein, 10 aa, Artificial Sequence
  Artifcially synthesized peptide
RRYSRSPYSF

SEQ ID NO: 2811 - protein, 10 aa, Artificial Sequence
  Artifcially synthesized peptide
RRYSRSPYSK

SEQ ID NO: 2812 - protein, 10 aa, Artificial Sequence
  Artifcially synthesized peptide
RRYSRSPYSL

SEQ ID NO: 2813 - protein, 10 aa, Artificial Sequence
  Artifcially synthesized peptide
RRYSRSPYSM

SEQ ID NO: 2814 - protein, 10 aa, Artificial Sequence
  Artifcially synthesized peptide
RRYSRSPYSR

SEQ ID NO: 2815 - protein, 10 aa, Artificial Sequence
  Artifcially synthesized peptide
RRYTNRVVTF

SEQ ID NO: 2816 - protein, 10 aa, Artificial Sequence
  Artifcially synthesized peptide
RRYTNRVVTK

SEQ ID NO: 2817 - protein, 10 aa, Artificial Sequence
  Artifcially synthesized peptide
RRYTNRVVTL

SEQ ID NO: 2818 - protein, 10 aa, Artificial Sequence
  Artifcially synthesized peptide
RRYTNRVVTM

SEQ ID NO: 2819 - protein, 10 aa, Artificial Sequence
  Artifcially synthesized peptide
RRYTNRVVTR

SEQ ID NO: 2820 - protein, 9 aa, Artificial Sequence
  Artifcially synthesized peptide
RSASFSRKV

SEQ ID NO: 2821 - protein, 8 aa, Artificial Sequence
  Artifcially synthesized peptide
RSASLAKL

SEQ ID NO: 2822 - protein, 10 aa, Artificial Sequence
  Artifcially synthesized peptide
RSASLAKLGY

SEQ ID NO: 2823 - protein, 13 aa, Artificial Sequence
  Artifcially synthesized peptide
RSASPDDDLGSSN

SEQ ID NO: 2824 - protein, 10 aa, Artificial Sequence
  Artifcially synthesized peptide
RSASPSSQGW

SEQ ID NO: 2825 - protein, 10 aa, Artificial Sequence
  Artifcially synthesized peptide
RSASPSSQGW

SEQ ID NO: 2826 - protein, 9 aa, Artificial Sequence
  Artifcially synthesized peptide
RSASPTVPR

SEQ ID NO: 2827 - protein, 9 aa, Artificial Sequence
  Artifcially synthesized peptide
RSASQERSL

SEQ ID NO: 2828 - protein, 11 aa, Artificial Sequence
  Artifcially synthesized peptide
RSASSATQVHK

SEQ ID NO: 2829 - protein, 11 aa, Artificial Sequence
  Artifcially synthesized peptide
RSASSATQVHY

SEQ ID NO: 2830 - protein, 10 aa, Artificial Sequence
  Artifcially synthesized peptide
RSASVGAEEY

SEQ ID NO: 2831 - protein, 9 aa, Artificial Sequence
  Artifcially synthesized peptide
RSDSSQPML

SEQ ID NO: 2832 - protein, 9 aa, Artificial Sequence
  Artifcially synthesized peptide
RSDSSQPML

SEQ ID NO: 2833 - protein, 9 aa, Artificial Sequence
  Artifcially synthesized peptide
RSDSSQPML

SEQ ID NO: 2834 - protein, 13 aa, Artificial Sequence
  Artifcially synthesized peptide
RSDPSKSPGSLRY

SEQ ID NO: 2835 - protein, 9 aa, Artificial Sequence
  Artifcially synthesized peptide
RSDSPKIDL

SEQ ID NO: 2836 - protein, 9 aa, Artificial Sequence
  Artifcially synthesized peptide
RSDSPKIDY

SEQ ID NO: 2837 - protein, 9 aa, Artificial Sequence
  Artifcially synthesized peptide
RSDSRAQAV

SEQ ID NO: 2838 - protein, 9 aa, Artificial Sequence
  Artifcially synthesized peptide
RSDSRAQAY

SEQ ID NO: 2839 - protein, 9 aa, Artificial Sequence
  Artifcially synthesized peptide
RSDSVGENL

SEQ ID NO: 2840 - protein, 9 aa, Artificial Sequence
  Artifcially synthesized peptide
RSDSVGENY

SEQ ID NO: 2841 - protein, 8 aa, Artificial Sequence
  Artifcially synthesized peptide
RSDSYVEL

SEQ ID NO: 2842 - protein, 11 aa, Artificial Sequence
  Artifcially synthesized peptide
RSDSYVELSQY

SEQ ID NO: 2843 - protein, 13 aa, Artificial Sequence
  Artifcially synthesized peptide
RSEPSKSPGSLRY

SEQ ID NO: 2844 - protein, 9 aa, Artificial Sequence
  Artifcially synthesized peptide
RSESKDRKF

SEQ ID NO: 2845 - protein, 9 aa, Artificial Sequence
  Artifcially synthesized peptide
RSESKDRKL

SEQ ID NO: 2846 - protein, 9 aa, Artificial Sequence
  Artifcially synthesized peptide
RSESKDRKM

SEQ ID NO: 2847 - protein, 9 aa, Artificial Sequence
  Artifcially synthesized peptide
RSESKDRKV

SEQ ID NO: 2848 - protein, 9 aa, Artificial Sequence
  Artifcially synthesized peptide
RSESPKIDL

SEQ ID NO: 2849 - protein, 9 aa, Artificial Sequence
  Artifcially synthesized peptide
RSESPKIDY

SEQ ID NO: 2850 - protein, 9 aa, Artificial Sequence
  Artifcially synthesized peptide
RSESPPAEL

SEQ ID NO: 2851 - protein, 9 aa, Artificial Sequence
  Artifcially synthesized peptide
RSESRAQAV

SEQ ID NO: 2852 - protein, 9 aa, Artificial Sequence
  Artifcially synthesized peptide
RSESRAQAY

SEQ ID NO: 2853 - protein, 10 aa, Artificial Sequence
  Artifcially synthesized peptide
RSESTENQSY

SEQ ID NO: 2854 - protein, 9 aa, Artificial Sequence
  Artifcially synthesized peptide
RSESVGENL

SEQ ID NO: 2855 - protein, 9 aa, Artificial Sequence
  Artifcially synthesized peptide
RSESVGENY

SEQ ID NO: 2856 - protein, 11 aa, Artificial Sequence
  Artifcially synthesized peptide
RSESYVELSQY

SEQ ID NO: 2857 - protein, 9 aa, Artificial Sequence
  Artifcially synthesized peptide
RSFSGLIKR

SEQ ID NO: 2858 - protein, 9 aa, Artificial Sequence
  Artifcially synthesized peptide
RSFSPTMKV

SEQ ID NO: 2859 - protein, 9 aa, Artificial Sequence
  Artifcially synthesized peptide
RSFSVEREL

SEQ ID NO: 2860 - protein, 8 aa, Artificial Sequence
  Artifcially synthesized peptide
RSFTPLSI

SEQ ID NO: 2861 - protein, 10 aa, Artificial Sequence
  Artifcially synthesized peptide
RSFTPLSILK

SEQ ID NO: 2862 - protein, 9 aa, Artificial Sequence
  Artifcially synthesized peptide
RSGSLERKF

SEQ ID NO: 2863 - protein, 9 aa, Artificial Sequence
  Artifcially synthesized peptide
RSGSLERKL

SEQ ID NO: 2864 - protein, 9 aa, Artificial Sequence
  Artifcially synthesized peptide
RSGSLERKM

SEQ ID NO: 2865 - protein, 9 aa, Artificial Sequence
  Artifcially synthesized peptide
RSGSLERKV

SEQ ID NO: 2866 - protein, 9 aa, Artificial Sequence
  Artifcially synthesized peptide
RSHSPLRSK

SEQ ID NO: 2867 - protein, 9 aa, Artificial Sequence
  Artifcially synthesized peptide
RSHSPMSNR

SEQ ID NO: 2868 - protein, 9 aa, Artificial Sequence
  Artifcially synthesized peptide
RSHSPPLKL

SEQ ID NO: 2869 - protein, 9 aa, Artificial Sequence
  Artifcially synthesized peptide
RSHSSPASL

SEQ ID NO: 2870 - protein, 9 aa, Artificial Sequence
  Artifcially synthesized peptide
RSHSSPASL

SEQ ID NO: 2871 - protein, 9 aa, Artificial Sequence
  Artifcially synthesized peptide
RSHSSPASL

SEQ ID NO: 2872 - protein, 10 aa, Artificial Sequence
  Artifcially synthesized peptide
RSISASDLTF

SEQ ID NO: 2873 - protein, 10 aa, Artificial Sequence
  Artifcially synthesized peptide
RSISNEGLTL

SEQ ID NO: 2874 - protein, 9 aa, Artificial Sequence
  Artifcially synthesized peptide
RSISSLLRF

SEQ ID NO: 2875 - protein, 9 aa, Artificial Sequence
  Artifcially synthesized peptide
RSISTPTCL

SEQ ID NO: 2876 - protein, 9 aa, Artificial Sequence
  Artifcially synthesized peptide
RSISVGENL

SEQ ID NO: 2877 - protein, 9 aa, Artificial Sequence
  Artifcially synthesized peptide
RSKSATLLY

SEQ ID NO: 2878 - protein, 9 aa, Artificial Sequence
  Artifcially synthesized peptide
RSKSLTNLV

SEQ ID NO: 2879 - protein, 9 aa, Artificial Sequence
  Artifcially synthesized peptide
RSKTPPKSY

SEQ ID NO: 2880 - protein, 9 aa, Artificial Sequence
  Artifcially synthesized peptide
RSLSSGESL

SEQ ID NO: 2881 - protein, 11 aa, Artificial Sequence
  Artifcially synthesized peptide
RSLGSVQAPSY

SEQ ID NO: 2882 - protein, 9 aa, Artificial Sequence
  Artifcially synthesized peptide
RSLSASPAL

SEQ ID NO: 2883 - protein, 10 aa, Artificial Sequence
  Artifcially synthesized peptide
RSLSERLLQL

SEQ ID NO: 2884 - protein, 9 aa, Artificial Sequence
  Artifcially synthesized peptide
RSLSESYEL

SEQ ID NO: 2885 - protein, 9 aa, Artificial Sequence
  Artifcially synthesized peptide
RSLSFSDEM

SEQ ID NO: 2886 - protein, 11 aa, Artificial Sequence
  Artifcially synthesized peptide
RSLSPFRRHSW

SEQ ID NO: 2887 - protein, 9 aa, Artificial Sequence
  Artifcially synthesized peptide
RSLSPGGAA

SEQ ID NO: 2888 - protein, 12 aa, Artificial Sequence
  Artifcially synthesized peptide
RSLSPGGAALGY

SEQ ID NO: 2889 - protein, 9 aa, Artificial Sequence
  Artifcially synthesized peptide
RSLSPGGAF

SEQ ID NO: 2890 - protein, 9 aa, Artificial Sequence
  Artifcially synthesized peptide
RSLSPGGAL

SEQ ID NO: 2891 - protein, 9 aa, Artificial Sequence
  Artifcially synthesized peptide
RSLSPGGAM

SEQ ID NO: 2892 - protein, 9 aa, Artificial Sequence
  Artifcially synthesized peptide
RSLSPGGAV

SEQ ID NO: 2893 - protein, 10 aa, Artificial Sequence
  Artifcially synthesized peptide
RSLSPILPGR

SEQ ID NO: 2894 - protein, 9 aa, Artificial Sequence
  Artifcially synthesized peptide
RSLSPLIKF

SEQ ID NO: 2895 - protein, 8 aa, Artificial Sequence
  Artifcially synthesized peptide
RSLSPLLF

SEQ ID NO: 2896 - protein, 8 aa, Artificial Sequence
  Artifcially synthesized peptide
RSLSPLLL

SEQ ID NO: 2897 - protein, 8 aa, Artificial Sequence
  Artifcially synthesized peptide
RSLSPLLM

SEQ ID NO: 2898 - protein, 8 aa, Artificial Sequence
  Artifcially synthesized peptide
RSLSPLLV

SEQ ID NO: 2899 - protein, 11 aa, Artificial Sequence
  Artifcially synthesized peptide
RSLSPSSNSAF

SEQ ID NO: 2900 - protein, 10 aa, Artificial Sequence
  Artifcially synthesized peptide
RSLSQELVGV

SEQ ID NO: 2901 - protein, 9 aa, Artificial Sequence
  Artifcially synthesized peptide
RSLSRVRVL

SEQ ID NO: 2902 - protein, 10 aa, Artificial Sequence
  Artifcially synthesized peptide
RSLSSYRGKY

SEQ ID NO: 2903 - protein, 9 aa, Artificial Sequence
  Artifcially synthesized peptide
RSLSTTNVF

SEQ ID NO: 2904 - protein, 9 aa, Artificial Sequence
  Artifcially synthesized peptide
RSLSVEIVK

SEQ ID NO: 2905 - protein, 9 aa, Artificial Sequence
  Artifcially synthesized peptide
RSLSVEIVY

SEQ ID NO: 2906 - protein, 9 aa, Artificial Sequence
  Artifcially synthesized peptide
RSLSVGSEF

SEQ ID NO: 2907 - protein, 9 aa, Artificial Sequence
  Artifcially synthesized peptide
RSLSVPVDL

SEQ ID NO: 2908 - protein, 8 aa, Artificial Sequence
  Artifcially synthesized peptide
RSLTHLSL

SEQ ID NO: 2909 - protein, 9 aa, Artificial Sequence
  Artifcially synthesized peptide
RSLTHPPTI

SEQ ID NO: 2910 - protein, 9 aa, Artificial Sequence
  Artifcially synthesized peptide
RSMSGGHGL

SEQ ID NO: 2911 - protein, 9 aa, Artificial Sequence
  Artifcially synthesized peptide
RSMSMPVAH

SEQ ID NO: 2912 - protein, 9 aa, Artificial Sequence
  Artifcially synthesized peptide
RSMSMPVAK

SEQ ID NO: 2913 - protein, 9 aa, Artificial Sequence
  Artifcially synthesized peptide
RSNSLVSTF

SEQ ID NO: 2914 - protein, 9 aa, Artificial Sequence
  Artifcially synthesized peptide
RSNSPLPSI

SEQ ID NO: 2915 - protein, 18 aa, Artificial Sequence
  Artifcially synthesized peptide
RSPEDEYELLMPHRISSH

SEQ ID NO: 2916 - protein, 11 aa, Artificial Sequence
  Artifcially synthesized peptide
RSPEPDPYLSY

SEQ ID NO: 2917 - protein, 9 aa, Artificial Sequence
  Artifcially synthesized peptide
RSPSFNMQL

SEQ ID NO: 2918 - protein, 10 aa, Artificial Sequence
  Artifcially synthesized peptide
RSPSKPTLAY

SEQ ID NO: 2919 - protein, 9 aa, Artificial Sequence
  Artifcially synthesized peptide
RSPSPKTSL

SEQ ID NO: 2920 - protein, 11 aa, Artificial Sequence
  Artifcially synthesized peptide
RSPSPSFRWPF

SEQ ID NO: 2921 - protein, 10 aa, Artificial Sequence
  Artifcially synthesized peptide
RSPSPTLSYY

SEQ ID NO: 2922 - protein, 10 aa, Artificial Sequence
  Artifcially synthesized peptide
RSPTKSSLDY

SEQ ID NO: 2923 - protein, 11 aa, Artificial Sequence
  Artifcially synthesized peptide
RSPTKSSLDYR

SEQ ID NO: 2924 - protein, 9 aa, Artificial Sequence
  Artifcially synthesized peptide
RSRPALSPL

SEQ ID NO: 2925 - protein, 9 aa, Artificial Sequence
  Artifcially synthesized peptide
RSRRSPLLK

SEQ ID NO: 2926 - protein, 9 aa, Artificial Sequence
  Artifcially synthesized peptide
RSRRSPLLY

SEQ ID NO: 2927 - protein, 8 aa, Artificial Sequence
  Artifcially synthesized peptide
RSRSPLEL

SEQ ID NO: 2928 - protein, 9 aa, Artificial Sequence
  Artifcially synthesized peptide
RSRSPLGFY

SEQ ID NO: 2929 - protein, 9 aa, Artificial Sequence
  Artifcially synthesized peptide
RSRSPPPVS

SEQ ID NO: 2930 - protein, 10 aa, Artificial Sequence
  Artifcially synthesized peptide
RSRSPPPVSK

SEQ ID NO: 2931 - protein, 10 aa, Artificial Sequence
  Artifcially synthesized peptide
RSRSPPPVSY

SEQ ID NO: 2932 - protein, 9 aa, Artificial Sequence
  Artifcially synthesized peptide
RSRSPRPAF

SEQ ID NO: 2933 - protein, 9 aa, Artificial Sequence
  Artifcially synthesized peptide
RSRSPRPAL

SEQ ID NO: 2934 - protein, 9 aa, Artificial Sequence
  Artifcially synthesized peptide
RSRSPRPAM

SEQ ID NO: 2935 - protein, 9 aa, Artificial Sequence
  Artifcially synthesized peptide
RSRSPRPAV

SEQ ID NO: 2936 - protein, 9 aa, Artificial Sequence
  Artifcially synthesized peptide
RSRSRDRMY

SEQ ID NO: 2937 - protein, 9 aa, Artificial Sequence
  Artifcially synthesized peptide
RSRSVPVSF

SEQ ID NO: 2938 - protein, 10 aa, Artificial Sequence
  Artifcially synthesized peptide
RSRSYSPRRY

SEQ ID NO: 2939 - protein, 9 aa, Artificial Sequence
  Artifcially synthesized peptide
RSRSYTPEY

SEQ ID NO: 2940 - protein, 10 aa, Artificial Sequence
  Artifcially synthesized peptide
RSRTSPITRR

SEQ ID NO: 2941 - protein, 10 aa, Artificial Sequence
  Artifcially synthesized peptide
RSRTSPITRY

SEQ ID NO: 2942 - protein, 8 aa, Artificial Sequence
  Artifcially synthesized peptide
RSSFLQVF

SEQ ID NO: 2943 - protein, 9 aa, Artificial Sequence
  Artifcially synthesized peptide
RSSPRTISF

SEQ ID NO: 2944 - protein, 10 aa, Artificial Sequence
  Artifcially synthesized peptide
RSSQFGSLEF

SEQ ID NO: 2945 - protein, 9 aa, Artificial Sequence
  Artifcially synthesized peptide
RSSSAPLGL

SEQ ID NO: 2946 - protein, 10 aa, Artificial Sequence
  Artifcially synthesized peptide
RSSSFKDFAK

SEQ ID NO: 2947 - protein, 9 aa, Artificial Sequence
  Artifcially synthesized peptide
RSSSFSDTL

SEQ ID NO: 2948 - protein, 10 aa, Artificial Sequence
  Artifcially synthesized peptide
RSSSFVLPKL

SEQ ID NO: 2949 - protein, 9 aa, Artificial Sequence
  Artifcially synthesized peptide
RSSSLIRHK

SEQ ID NO: 2950 - protein, 9 aa, Artificial Sequence
  Artifcially synthesized peptide
RSSSLIRHY

SEQ ID NO: 2951 - protein, 9 aa, Artificial Sequence
  Artifcially synthesized peptide
RSSSLQRRV

SEQ ID NO: 2952 - protein, 10 aa, Artificial Sequence
  Artifcially synthesized peptide
RSSSLSDFSW

SEQ ID NO: 2953 - protein, 9 aa, Artificial Sequence
  Artifcially synthesized peptide
RSSSPFLSK

SEQ ID NO: 2954 - protein, 8 aa, Artificial Sequence
  Artifcially synthesized peptide
RSSSPLQL

SEQ ID NO: 2955 - protein, 10 aa, Artificial Sequence
  Artifcially synthesized peptide
RSSSPPILTK

SEQ ID NO: 2956 - protein, 9 aa, Artificial Sequence
  Artifcially synthesized peptide
RSSSPVTEL

SEQ ID NO: 2957 - protein, 9 aa, Artificial Sequence
  Artifcially synthesized peptide
RSSTPLPTI

SEQ ID NO: 2958 - protein, 9 aa, Artificial Sequence
  Artifcially synthesized peptide
RSTSLSLKY

SEQ ID NO: 2959 - protein, 9 aa, Artificial Sequence
  Artifcially synthesized peptide
RSVSGFLHF

SEQ ID NO: 2960 - protein, 9 aa, Artificial Sequence
  Artifcially synthesized peptide
RSVSLDSQM

SEQ ID NO: 2961 - protein, 11 aa, Artificial Sequence
  Artifcially synthesized peptide
RSVSLDSQMGY

SEQ ID NO: 2962 - protein, 9 aa, Artificial Sequence
  Artifcially synthesized peptide
RSVSLSMRK

SEQ ID NO: 2963 - protein, 9 aa, Artificial Sequence
  Artifcially synthesized peptide
RSVSLSMRY

SEQ ID NO: 2964 - protein, 8 aa, Artificial Sequence
  Artifcially synthesized peptide
RSVSPTFL

SEQ ID NO: 2965 - protein, 9 aa, Artificial Sequence
  Artifcially synthesized peptide
RSVSPVQDL

SEQ ID NO: 2966 - protein, 14 aa, Artificial Sequence
  Artifcially synthesized peptide
RSWKYNQSISLRRP

SEQ ID NO: 2967 - protein, 9 aa, Artificial Sequence
  Artifcially synthesized peptide
RSWSPPPEV

SEQ ID NO: 2968 - protein, 11 aa, Artificial Sequence
  Artifcially synthesized peptide
RSWSPPPEVSR

SEQ ID NO: 2969 - protein, 10 aa, Artificial Sequence
  Artifcially synthesized peptide
RSYSDPPLKF

SEQ ID NO: 2970 - protein, 9 aa, Artificial Sequence
  Artifcially synthesized peptide
RSYSGSRSK

SEQ ID NO: 2971 - protein, 9 aa, Artificial Sequence
  Artifcially synthesized peptide
RSYSGSRSR

SEQ ID NO: 2972 - protein, 9 aa, Artificial Sequence
  Artifcially synthesized peptide
RSYSGSRSR

SEQ ID NO: 2973 - protein, 9 aa, Artificial Sequence
  Artifcially synthesized peptide
RSYSGSRSY

SEQ ID NO: 2974 - protein, 10 aa, Artificial Sequence
  Artifcially synthesized peptide
RSYSPDHRQK

SEQ ID NO: 2975 - protein, 10 aa, Artificial Sequence
  Artifcially synthesized peptide
RSYSPDHRQY

SEQ ID NO: 2976 - protein, 9 aa, Artificial Sequence
  Artifcially synthesized peptide
RSYSPERSK

SEQ ID NO: 2977 - protein, 11 aa, Artificial Sequence
  Artifcially synthesized peptide
RSYSPERSKSY

SEQ ID NO: 2978 - protein, 13 aa, Artificial Sequence
  Artifcially synthesized peptide
RSYSPERSKSYSF

SEQ ID NO: 2979 - protein, 9 aa, Artificial Sequence
  Artifcially synthesized peptide
RSYSPERSY

SEQ ID NO: 2980 - protein, 9 aa, Artificial Sequence
  Artifcially synthesized peptide
RSYSPRNSR

SEQ ID NO: 2981 - protein, 9 aa, Artificial Sequence
  Artifcially synthesized peptide
RSYSPRNSY

SEQ ID NO: 2982 - protein, 9 aa, Artificial Sequence
  Artifcially synthesized peptide
RSYSRSFSK

SEQ ID NO: 2983 - protein, 9 aa, Artificial Sequence
  Artifcially synthesized peptide
RSYSRSFSR

SEQ ID NO: 2984 - protein, 9 aa, Artificial Sequence
  Artifcially synthesized peptide
RSYSRSFSY

SEQ ID NO: 2985 - protein, 9 aa, Artificial Sequence
  Artifcially synthesized peptide
RSYSYPRQK

SEQ ID NO: 2986 - protein, 9 aa, Artificial Sequence
  Artifcially synthesized peptide
RSYSYPRQY

SEQ ID NO: 2987 - protein, 14 aa, Artificial Sequence
  Artifcially synthesized peptide
RSYVTTSTRTYSLG

SEQ ID NO: 2988 - protein, 9 aa, Artificial Sequence
  Artifcially synthesized peptide
RTSSFALNL

SEQ ID NO: 2989 - protein, 9 aa, Artificial Sequence
  Artifcially synthesized peptide
RTASFAVRK

SEQ ID NO: 2990 - protein, 9 aa, Artificial Sequence
  Artifcially synthesized peptide
RTASFAVRY

SEQ ID NO: 2991 - protein, 9 aa, Artificial Sequence
  Artifcially synthesized peptide
RTASLIIKV

SEQ ID NO: 2992 - protein, 13 aa, Artificial Sequence
  Artifcially synthesized peptide
RTASLSNQECQLY

SEQ ID NO: 2993 - protein, 9 aa, Artificial Sequence
  Artifcially synthesized peptide
RTASLVSGL

SEQ ID NO: 2994 - protein, 10 aa, Artificial Sequence
  Artifcially synthesized peptide
RTASPPALPK

SEQ ID NO: 2995 - protein, 10 aa, Artificial Sequence
  Artifcially synthesized peptide
RTASPPPPPK

SEQ ID NO: 2996 - protein, 12 aa, Artificial Sequence
  Artifcially synthesized peptide
RTATADDKKLQF

SEQ ID NO: 2997 - protein, 13 aa, Artificial Sequence
  Artifcially synthesized peptide
RTDPSKSPGSLRY

SEQ ID NO: 2998 - protein, 9 aa, Artificial Sequence
  Artifcially synthesized peptide
RTDSIGEKL

SEQ ID NO: 2999 - protein, 12 aa, Artificial Sequence
  Artifcially synthesized peptide
RTDSIGEKLGRY

SEQ ID NO: 3000 - protein, 9 aa, Artificial Sequence
  Artifcially synthesized peptide
RTDSPKIDL

SEQ ID NO: 3001 - protein, 9 aa, Artificial Sequence
  Artifcially synthesized peptide
RTDSPKIDY

SEQ ID NO: 3002 - protein, 9 aa, Artificial Sequence
  Artifcially synthesized peptide
RTDSRAQAV

SEQ ID NO: 3003 - protein, 9 aa, Artificial Sequence
  Artifcially synthesized peptide
RTDSRAQAY

SEQ ID NO: 3004 - protein, 9 aa, Artificial Sequence
  Artifcially synthesized peptide
RTDSREQKL

SEQ ID NO: 3005 - protein, 9 aa, Artificial Sequence
  Artifcially synthesized peptide
RTDSRGVNL

SEQ ID NO: 3006 - protein, 11 aa, Artificial Sequence
  Artifcially synthesized peptide
RTDSYVELSQY

SEQ ID NO: 3007 - protein, 13 aa, Artificial Sequence
  Artifcially synthesized peptide
RTEPSKSPGSLRY

SEQ ID NO: 3008 - protein, 10 aa, Artificial Sequence
  Artifcially synthesized peptide
RTESDSGLKF

SEQ ID NO: 3009 - protein, 10 aa, Artificial Sequence
  Artifcially synthesized peptide
RTESDSGLKK

SEQ ID NO: 3010 - protein, 10 aa, Artificial Sequence
  Artifcially synthesized peptide
RTESDSGLKL

SEQ ID NO: 3011 - protein, 10 aa, Artificial Sequence
  Artifcially synthesized peptide
RTESDSGLKM

SEQ ID NO: 3012 - protein, 10 aa, Artificial Sequence
  Artifcially synthesized peptide
RTESDSGLKV

SEQ ID NO: 3013 - protein, 9 aa, Artificial Sequence
  Artifcially synthesized peptide
RTESPKIDL

SEQ ID NO: 3014 - protein, 9 aa, Artificial Sequence
  Artifcially synthesized peptide
RTESPKIDY

SEQ ID NO: 3015 - protein, 9 aa, Artificial Sequence
  Artifcially synthesized peptide
RTESRAQAV

SEQ ID NO: 3016 - protein, 9 aa, Artificial Sequence
  Artifcially synthesized peptide
RTESRAQAY

SEQ ID NO: 3017 - protein, 11 aa, Artificial Sequence
  Artifcially synthesized peptide
RTESYVELSQY

SEQ ID NO: 3018 - protein, 10 aa, Artificial Sequence
  Artifcially synthesized peptide
RTFSDESNVL

SEQ ID NO: 3019 - protein, 9 aa, Artificial Sequence
  Artifcially synthesized peptide
RTFSESSVW

SEQ ID NO: 3020 - protein, 9 aa, Artificial Sequence
  Artifcially synthesized peptide
RTFSLDTIL

SEQ ID NO: 3021 - protein, 7 aa, Artificial Sequence
  Artifcially synthesized peptide
RTFSPTY

SEQ ID NO: 3022 - protein, 9 aa, Artificial Sequence
  Artifcially synthesized peptide
RTFSPTYGF

SEQ ID NO: 3023 - protein, 9 aa, Artificial Sequence
  Artifcially synthesized peptide
RTFSPTYGL

SEQ ID NO: 3024 - protein, 11 aa, Artificial Sequence
  Artifcially synthesized peptide
RTFSPTYGLLR

SEQ ID NO: 3025 - protein, 9 aa, Artificial Sequence
  Artifcially synthesized peptide
RTFSPTYGM

SEQ ID NO: 3026 - protein, 9 aa, Artificial Sequence
  Artifcially synthesized peptide
RTFSPTYGV

SEQ ID NO: 3027 - protein, 9 aa, Artificial Sequence
  Artifcially synthesized peptide
RTFSYIKNK

SEQ ID NO: 3028 - protein, 9 aa, Artificial Sequence
  Artifcially synthesized peptide
RTGSPALGL

SEQ ID NO: 3029 - protein, 9 aa, Artificial Sequence
  Artifcially synthesized peptide
RTHSLLLLL

SEQ ID NO: 3030 - protein, 11 aa, Artificial Sequence
  Artifcially synthesized peptide
RTISAQDTLAY

SEQ ID NO: 3031 - protein, 11 aa, Artificial Sequence
  Artifcially synthesized peptide
RTISNPEVVMK

SEQ ID NO: 3032 - protein, 11 aa, Artificial Sequence
  Artifcially synthesized peptide
RTISPPTLGTL

SEQ ID NO: 3033 - protein, 9 aa, Artificial Sequence
  Artifcially synthesized peptide
RTISQSSSL

SEQ ID NO: 3034 - protein, 9 aa, Artificial Sequence
  Artifcially synthesized peptide
RTISVILFL

SEQ ID NO: 3035 - protein, 9 aa, Artificial Sequence
  Artifcially synthesized peptide
RTLSHISEA

SEQ ID NO: 3036 - protein, 9 aa, Artificial Sequence
  Artifcially synthesized peptide
RTLSHISEV

SEQ ID NO: 3037 - protein, 9 aa, Artificial Sequence
  Artifcially synthesized peptide
RTLSMDKGF

SEQ ID NO: 3038 - protein, 10 aa, Artificial Sequence
  Artifcially synthesized peptide
RTLSPEIITV

SEQ ID NO: 3039 - protein, 9 aa, Artificial Sequence
  Artifcially synthesized peptide
RTLSPSSGY

SEQ ID NO: 3040 - protein, 9 aa, Artificial Sequence
  Artifcially synthesized peptide
RTLSVESLI

SEQ ID NO: 3041 - protein, 11 aa, Artificial Sequence
  Artifcially synthesized peptide
RTMSEAALVRK

SEQ ID NO: 3042 - protein, 9 aa, Artificial Sequence
  Artifcially synthesized peptide
RTMSPIQVL

SEQ ID NO: 3043 - protein, 9 aa, Artificial Sequence
  Artifcially synthesized peptide
RTNSPGFQK

SEQ ID NO: 3044 - protein, 9 aa, Artificial Sequence
  Artifcially synthesized peptide
RTPSDVKEL

SEQ ID NO: 3045 - protein, 10 aa, Artificial Sequence
  Artifcially synthesized peptide
RTPSFLKKNK

SEQ ID NO: 3046 - protein, 10 aa, Artificial Sequence
  Artifcially synthesized peptide
RTPSFLKKNY

SEQ ID NO: 3047 - protein, 9 aa, Artificial Sequence
  Artifcially synthesized peptide
RTPSISFHH

SEQ ID NO: 3048 - protein, 10 aa, Artificial Sequence
  Artifcially synthesized peptide
RTPSPARPAL

SEQ ID NO: 3049 - protein, 12 aa, Artificial Sequence
  Artifcially synthesized peptide
RTPSPKSLPSYL

SEQ ID NO: 3050 - protein, 9 aa, Artificial Sequence
  Artifcially synthesized peptide
RTPSQIIRK

SEQ ID NO: 3051 - protein, 11 aa, Artificial Sequence
  Artifcially synthesized peptide
RTPSSSSTLAY

SEQ ID NO: 3052 - protein, 9 aa, Artificial Sequence
  Artifcially synthesized peptide
RTRSLPITI

SEQ ID NO: 3053 - protein, 11 aa, Artificial Sequence
  Artifcially synthesized peptide
RTRSLSSLREK

SEQ ID NO: 3054 - protein, 11 aa, Artificial Sequence
  Artifcially synthesized peptide
RTRSLSSLREY

SEQ ID NO: 3055 - protein, 9 aa, Artificial Sequence
  Artifcially synthesized peptide
RTRSPSPTF

SEQ ID NO: 3056 - protein, 9 aa, Artificial Sequence
  Artifcially synthesized peptide
RTRSPSPTL

SEQ ID NO: 3057 - protein, 9 aa, Artificial Sequence
  Artifcially synthesized peptide
RTRSPSPTM

SEQ ID NO: 3058 - protein, 9 aa, Artificial Sequence
  Artifcially synthesized peptide
RTRSPSPTV

SEQ ID NO: 3059 - protein, 9 aa, Artificial Sequence
  Artifcially synthesized peptide
RTSSFALNL

SEQ ID NO: 3060 - protein, 9 aa, Artificial Sequence
  Artifcially synthesized peptide
RTSSFTEQL

SEQ ID NO: 3061 - protein, 9 aa, Artificial Sequence
  Artifcially synthesized peptide
RTSSFTFQN

SEQ ID NO: 3062 - protein, 9 aa, Artificial Sequence
  Artifcially synthesized peptide
RTSSPLFNK

SEQ ID NO: 3063 - protein, 11 aa, Artificial Sequence
  Artifcially synthesized peptide
RTSSQRSTLTY

SEQ ID NO: 3064 - protein, 9 aa, Artificial Sequence
  Artifcially synthesized peptide
RTVSPAHVL

SEQ ID NO: 3065 - protein, 9 aa, Artificial Sequence
  Artifcially synthesized peptide
RTVSPELIL

SEQ ID NO: 3066 - protein, 9 aa, Artificial Sequence
  Artifcially synthesized peptide
RTYKSPLRH

SEQ ID NO: 3067 - protein, 9 aa, Artificial Sequence
  Artifcially synthesized peptide
RTYKSPLRK

SEQ ID NO: 3068 - protein, 9 aa, Artificial Sequence
  Artifcially synthesized peptide
RTYKSPLRY

SEQ ID NO: 3069 - protein, 9 aa, Artificial Sequence
  Artifcially synthesized peptide
RTYSGPMNK

SEQ ID NO: 3070 - protein, 10 aa, Artificial Sequence
  Artifcially synthesized peptide
RTYSGPMNKV

SEQ ID NO: 3071 - protein, 9 aa, Artificial Sequence
  Artifcially synthesized peptide
RTYSHGTYR

SEQ ID NO: 3072 - protein, 9 aa, Artificial Sequence
  Artifcially synthesized peptide
RTYSLGSAL

SEQ ID NO: 3073 - protein, 9 aa, Artificial Sequence
  Artifcially synthesized peptide
RVASFAVRK

SEQ ID NO: 3074 - protein, 9 aa, Artificial Sequence
  Artifcially synthesized peptide
RVASFAVRY

SEQ ID NO: 3075 - protein, 9 aa, Artificial Sequence
  Artifcially synthesized peptide
RVASPLVHK

SEQ ID NO: 3076 - protein, 9 aa, Artificial Sequence
  Artifcially synthesized peptide
RVASPLVHY

SEQ ID NO: 3077 - protein, 10 aa, Artificial Sequence
  Artifcially synthesized peptide
RVASPPPPPK

SEQ ID NO: 3078 - protein, 10 aa, Artificial Sequence
  Artifcially synthesized peptide
RVASPPPPPY

SEQ ID NO: 3079 - protein, 9 aa, Artificial Sequence
  Artifcially synthesized peptide
RVASPSRKV

SEQ ID NO: 3080 - protein, 9 aa, Artificial Sequence
  Artifcially synthesized peptide
RVASPTSGV

SEQ ID NO: 3081 - protein, 10 aa, Artificial Sequence
  Artifcially synthesized peptide
RVASPTSGVK

SEQ ID NO: 3082 - protein, 11 aa, Artificial Sequence
  Artifcially synthesized peptide
RVASPTSGVKK

SEQ ID NO: 3083 - protein, 11 aa, Artificial Sequence
  Artifcially synthesized peptide
RVASPTSGVKR

SEQ ID NO: 3084 - protein, 10 aa, Artificial Sequence
  Artifcially synthesized peptide
RVASPTSGVY

SEQ ID NO: 3085 - protein, 9 aa, Artificial Sequence
  Artifcially synthesized peptide
RVASWAVSF

SEQ ID NO: 3086 - protein, 9 aa, Artificial Sequence
  Artifcially synthesized peptide
RVDSLEFSL

SEQ ID NO: 3087 - protein, 9 aa, Artificial Sequence
  Artifcially synthesized peptide
RVDSPSHGL

SEQ ID NO: 3088 - protein, 8 aa, Artificial Sequence
  Artifcially synthesized peptide
RVDSPVTV

SEQ ID NO: 3089 - protein, 9 aa, Artificial Sequence
  Artifcially synthesized peptide
RVDSTTCLF

SEQ ID NO: 3090 - protein, 9 aa, Artificial Sequence
  Artifcially synthesized peptide
RVGSLVLNL

SEQ ID NO: 3091 - protein, 9 aa, Artificial Sequence
  Artifcially synthesized peptide
RVISGVLQL

SEQ ID NO: 3092 - protein, 10 aa, Artificial Sequence
  Artifcially synthesized peptide
RVKLPSGSKK

SEQ ID NO: 3093 - protein, 11 aa, Artificial Sequence
  Artifcially synthesized peptide
RVKSPGSGHVK

SEQ ID NO: 3094 - protein, 11 aa, Artificial Sequence
  Artifcially synthesized peptide
RVKSPGSGHVY

SEQ ID NO: 3095 - protein, 9 aa, Artificial Sequence
  Artifcially synthesized peptide
RVKSPISLK

SEQ ID NO: 3096 - protein, 11 aa, Artificial Sequence
  Artifcially synthesized peptide
RVKSPSPKSER

SEQ ID NO: 3097 - protein, 11 aa, Artificial Sequence
  Artifcially synthesized peptide
RVKSPSPKSEY

SEQ ID NO: 3098 - protein, 9 aa, Artificial Sequence
  Artifcially synthesized peptide
RVKSWADNL

SEQ ID NO: 3099 - protein, 11 aa, Artificial Sequence
  Artifcially synthesized peptide
RVKTPTSQSYK

SEQ ID NO: 3100 - protein, 11 aa, Artificial Sequence
  Artifcially synthesized peptide
RVKTPTSQSYR

SEQ ID NO: 3101 - protein, 11 aa, Artificial Sequence
  Artifcially synthesized peptide
RVKTPTSQSYY

SEQ ID NO: 3102 - protein, 9 aa, Artificial Sequence
  Artifcially synthesized peptide
RVKTTPLRR

SEQ ID NO: 3103 - protein, 9 aa, Artificial Sequence
  Artifcially synthesized peptide
RVKTTPLRY

SEQ ID NO: 3104 - protein, 12 aa, Artificial Sequence
  Artifcially synthesized peptide
RVKVDGPRSPSY

SEQ ID NO: 3105 - protein, 12 aa, Artificial Sequence
  Artifcially synthesized peptide
RVLDRSPSRSAK

SEQ ID NO: 3106 - protein, 12 aa, Artificial Sequence
  Artifcially synthesized peptide
RVLDRSPSRSAY

SEQ ID NO: 3107 - protein, 9 aa, Artificial Sequence
  Artifcially synthesized peptide
RVLHSPPAV

SEQ ID NO: 3108 - protein, 9 aa, Artificial Sequence
  Artifcially synthesized peptide
RVLSGVVTK

SEQ ID NO: 3109 - protein, 9 aa, Artificial Sequence
  Artifcially synthesized peptide
RVLSPLIIK

SEQ ID NO: 3110 - protein, 10 aa, Artificial Sequence
  Artifcially synthesized peptide
RVMSSPSAMK

SEQ ID NO: 3111 - protein, 10 aa, Artificial Sequence
  Artifcially synthesized peptide
RVMSSPSAMK

SEQ ID NO: 3112 - protein, 10 aa, Artificial Sequence
  Artifcially synthesized peptide
RVMSSPSAMK

SEQ ID NO: 3113 - protein, 9 aa, Artificial Sequence
  Artifcially synthesized peptide
RVPSINQKI

SEQ ID NO: 3114 - protein, 9 aa, Artificial Sequence
  Artifcially synthesized peptide
RVPSKSLDL

SEQ ID NO: 3115 - protein, 9 aa, Artificial Sequence
  Artifcially synthesized peptide
RVPSLLVLL

SEQ ID NO: 3116 - protein, 10 aa, Artificial Sequence
  Artifcially synthesized peptide
RVPSPTPAPK

SEQ ID NO: 3117 - protein, 9 aa, Artificial Sequence
  Artifcially synthesized peptide
RVPSSTLKK

SEQ ID NO: 3118 - protein, 9 aa, Artificial Sequence
  Artifcially synthesized peptide
RVPSSTLKY

SEQ ID NO: 3119 - protein, 10 aa, Artificial Sequence
  Artifcially synthesized peptide
RVRKLPSTTL

SEQ ID NO: 3120 - protein, 10 aa, Artificial Sequence
  Artifcially synthesized peptide
RVRQSPLATK

SEQ ID NO: 3121 - protein, 10 aa, Artificial Sequence
  Artifcially synthesized peptide
RVRQSPLATR

SEQ ID NO: 3122 - protein, 10 aa, Artificial Sequence
  Artifcially synthesized peptide
RVRQSPLATY

SEQ ID NO: 3123 - protein, 11 aa, Artificial Sequence
  Artifcially synthesized peptide
RVRRSSFLNAK

SEQ ID NO: 3124 - protein, 11 aa, Artificial Sequence
  Artifcially synthesized peptide
RVRSLSSLREK

SEQ ID NO: 3125 - protein, 11 aa, Artificial Sequence
  Artifcially synthesized peptide
RVRSLSSLREY

SEQ ID NO: 3126 - protein, 9 aa, Artificial Sequence
  Artifcially synthesized peptide
RVRSPTRSF

SEQ ID NO: 3127 - protein, 9 aa, Artificial Sequence
  Artifcially synthesized peptide
RVRSPTRSL

SEQ ID NO: 3128 - protein, 9 aa, Artificial Sequence
  Artifcially synthesized peptide
RVRSPTRSM

SEQ ID NO: 3129 - protein, 9 aa, Artificial Sequence
  Artifcially synthesized peptide
RVRSPTRSP

SEQ ID NO: 3130 - protein, 9 aa, Artificial Sequence
  Artifcially synthesized peptide
RVRSPTRSV

SEQ ID NO: 3131 - protein, 9 aa, Artificial Sequence
  Artifcially synthesized peptide
RVSSLTLHL

SEQ ID NO: 3132 - protein, 9 aa, Artificial Sequence
  Artifcially synthesized peptide
RVSSPISKK

SEQ ID NO: 3133 - protein, 9 aa, Artificial Sequence
  Artifcially synthesized peptide
RVSSPISKY

SEQ ID NO: 3134 - protein, 9 aa, Artificial Sequence
  Artifcially synthesized peptide
RVSSPLASF

SEQ ID NO: 3135 - protein, 9 aa, Artificial Sequence
  Artifcially synthesized peptide
RVSSRFSSK

SEQ ID NO: 3136 - protein, 9 aa, Artificial Sequence
  Artifcially synthesized peptide
RVSSRFSSR

SEQ ID NO: 3137 - protein, 9 aa, Artificial Sequence
  Artifcially synthesized peptide
RVSSRFSSY

SEQ ID NO: 3138 - protein, 10 aa, Artificial Sequence
  Artifcially synthesized peptide
RVSSVKLISK

SEQ ID NO: 3139 - protein, 10 aa, Artificial Sequence
  Artifcially synthesized peptide
RVSSVKLISY

SEQ ID NO: 3140 - protein, 9 aa, Artificial Sequence
  Artifcially synthesized peptide
RVTSAEIKL

SEQ ID NO: 3141 - protein, 9 aa, Artificial Sequence
  Artifcially synthesized peptide
RVVPSPLQF

SEQ ID NO: 3142 - protein, 9 aa, Artificial Sequence
  Artifcially synthesized peptide
RVVSLSMRK

SEQ ID NO: 3143 - protein, 9 aa, Artificial Sequence
  Artifcially synthesized peptide
RVVSLSMRY

SEQ ID NO: 3144 - protein, 9 aa, Artificial Sequence
  Artifcially synthesized peptide
RVVSPGIDL

SEQ ID NO: 3145 - protein, 10 aa, Artificial Sequence
  Artifcially synthesized peptide
RVWEDRPSSA

SEQ ID NO: 3146 - protein, 10 aa, Artificial Sequence
  Artifcially synthesized peptide
RVWEDRPSSA

SEQ ID NO: 3147 - protein, 11 aa, Artificial Sequence
  Artifcially synthesized peptide
RVWSPPRVHKV

SEQ ID NO: 3148 - protein, 9 aa, Artificial Sequence
  Artifcially synthesized peptide
RVYQYIQSR

SEQ ID NO: 3149 - protein, 11 aa, Artificial Sequence
  Artifcially synthesized peptide
RVYQYIQSRFK

SEQ ID NO: 3150 - protein, 11 aa, Artificial Sequence
  Artifcially synthesized peptide
RVYQYIQSRFY

SEQ ID NO: 3151 - protein, 10 aa, Artificial Sequence
  Artifcially synthesized peptide
RVYQYIQSRK

SEQ ID NO: 3152 - protein, 10 aa, Artificial Sequence
  Artifcially synthesized peptide
RVYQYIQSRY

SEQ ID NO: 3153 - protein, 9 aa, Artificial Sequence
  Artifcially synthesized peptide
RVYSPYNHK

SEQ ID NO: 3154 - protein, 9 aa, Artificial Sequence
  Artifcially synthesized peptide
RVYSPYNHR

SEQ ID NO: 3155 - protein, 9 aa, Artificial Sequence
  Artifcially synthesized peptide
RVYSPYNHY

SEQ ID NO: 3156 - protein, 9 aa, Artificial Sequence
  Artifcially synthesized peptide
RVYSRSFSK

SEQ ID NO: 3157 - protein, 9 aa, Artificial Sequence
  Artifcially synthesized peptide
RVYSRSFSY

SEQ ID NO: 3158 - protein, 10 aa, Artificial Sequence
  Artifcially synthesized peptide
RVYTYIQSRF

SEQ ID NO: 3159 - protein, 12 aa, Artificial Sequence
  Artifcially synthesized peptide
RYLGGSMDLSTF

SEQ ID NO: 3160 - protein, 9 aa, Artificial Sequence
  Artifcially synthesized peptide
RYPSNLQLF

SEQ ID NO: 3161 - protein, 9 aa, Artificial Sequence
  Artifcially synthesized peptide
RYPTSIASL

SEQ ID NO: 3162 - protein, 9 aa, Artificial Sequence
  Artifcially synthesized peptide
RYQTQPVTL

SEQ ID NO: 3163 - protein, 13 aa, Artificial Sequence
  Artifcially synthesized peptide
RYRSPEPDPYLSY

SEQ ID NO: 3164 - protein, 22 aa, Artificial Sequence
  Artifcially synthesized peptide
SAARESHPHGVKRSASPDDDLG

SEQ ID NO: 3165 - protein, 10 aa, Artificial Sequence
  Artifcially synthesized peptide
SAASPVVSSM

SEQ ID NO: 3166 - protein, 9 aa, Artificial Sequence
  Artifcially synthesized peptide
SAESKTIEF

SEQ ID NO: 3167 - protein, 14 aa, Artificial Sequence
  Artifcially synthesized peptide
SAGGSAEALLSDLH

SEQ ID NO: 3168 - protein, 16 aa, Artificial Sequence
  Artifcially synthesized peptide
SAGGSAEALLSDLHAF

SEQ ID NO: 3169 - protein, 9 aa, Artificial Sequence
  Artifcially synthesized peptide
SAISPKSSL

SEQ ID NO: 3170 - protein, 9 aa, Artificial Sequence
  Artifcially synthesized peptide
SAISPTPEI

SEQ ID NO: 3171 - protein, 9 aa, Artificial Sequence
  Artifcially synthesized peptide
SAKSPLPSY

SEQ ID NO: 3172 - protein, 9 aa, Artificial Sequence
  Artifcially synthesized peptide
SAMSPTHHL

SEQ ID NO: 3173 - protein, 11 aa, Artificial Sequence
  Artifcially synthesized peptide
SAQGSDVSLTA

SEQ ID NO: 3174 - protein, 14 aa, Artificial Sequence
  Artifcially synthesized peptide
SARGSPTRPNPPVR

SEQ ID NO: 3175 - protein, 12 aa, Artificial Sequence
  Artifcially synthesized peptide
SAYGGLTSPGLS

SEQ ID NO: 3176 - protein, 13 aa, Artificial Sequence
  Artifcially synthesized peptide
SAYGGLTSPGLSY

SEQ ID NO: 3177 - protein, 15 aa, Artificial Sequence
  Artifcially synthesized peptide
SAYGGLTSPGLSYSL

SEQ ID NO: 3178 - protein, 10 aa, Artificial Sequence
  Artifcially synthesized peptide
SDDEKMPDLE

SEQ ID NO: 3179 - protein, 12 aa, Artificial Sequence
  Artifcially synthesized peptide
SDFHAERAAREK

SEQ ID NO: 3180 - protein, 9 aa, Artificial Sequence
  Artifcially synthesized peptide
SDMPRAHSF

SEQ ID NO: 3181 - protein, 12 aa, Artificial Sequence
  Artifcially synthesized peptide
SDSAQGSESHSL

SEQ ID NO: 3182 - protein, 11 aa, Artificial Sequence
  Artifcially synthesized peptide
SDSPPRPQPAF

SEQ ID NO: 3183 - protein, 14 aa, Artificial Sequence
  Artifcially synthesized peptide
SDSPPRPQPAFKYQ

SEQ ID NO: 3184 - protein, 15 aa, Artificial Sequence
  Artifcially synthesized peptide
SDYAVHPMSPVGRTS

SEQ ID NO: 3185 - protein, 9 aa, Artificial Sequence
  Artifcially synthesized peptide
SEASPSREA

SEQ ID NO: 3186 - protein, 10 aa, Artificial Sequence
  Artifcially synthesized peptide
SEASPSREAI

SEQ ID NO: 3187 - protein, 9 aa, Artificial Sequence
  Artifcially synthesized peptide
SEDSSRGAF

SEQ ID NO: 3188 - protein, 9 aa, Artificial Sequence
  Artifcially synthesized peptide
SEFKAMDSI

SEQ ID NO: 3189 - protein, 11 aa, Artificial Sequence
  Artifcially synthesized peptide
SEFTGFSGMSF

SEQ ID NO: 3190 - protein, 9 aa, Artificial Sequence
  Artifcially synthesized peptide
SEGSLDRLY

SEQ ID NO: 3191 - protein, 9 aa, Artificial Sequence
  Artifcially synthesized peptide
SEGSLHRKF

SEQ ID NO: 3192 - protein, 9 aa, Artificial Sequence
  Artifcially synthesized peptide
SEGSLHRKW

SEQ ID NO: 3193 - protein, 9 aa, Artificial Sequence
  Artifcially synthesized peptide
SEGSLHRKY

SEQ ID NO: 3194 - protein, 9 aa, Artificial Sequence
  Artifcially synthesized peptide
SELSPGRSV

SEQ ID NO: 3195 - protein, 9 aa, Artificial Sequence
  Artifcially synthesized peptide
SELTPSESL

SEQ ID NO: 3196 - protein, 9 aa, Artificial Sequence
  Artifcially synthesized peptide
SERIMQLSL

SEQ ID NO: 3197 - protein, 9 aa, Artificial Sequence
  Artifcially synthesized peptide
SESKSMPVL

SEQ ID NO: 3198 - protein, 10 aa, Artificial Sequence
  Artifcially synthesized peptide
SEVSPSGVGF

SEQ ID NO: 3199 - protein, 9 aa, Artificial Sequence
  Artifcially synthesized peptide
SEYQWITSP

SEQ ID NO: 3200 - protein, 9 aa, Artificial Sequence
  Artifcially synthesized peptide
SFDDGSVRL

SEQ ID NO: 3201 - protein, 9 aa, Artificial Sequence
  Artifcially synthesized peptide
SFDSGIAGL

SEQ ID NO: 3202 - protein, 9 aa, Artificial Sequence
  Artifcially synthesized peptide
SFDSGSVRL

SEQ ID NO: 3203 - protein, 9 aa, Artificial Sequence
  Artifcially synthesized peptide
SFLPRTLSL

SEQ ID NO: 3204 - protein, 14 aa, Artificial Sequence
  Artifcially synthesized peptide
SGGAQSPLRYLHVL

SEQ ID NO: 3205 - protein, 19 aa, Artificial Sequence
  Artifcially synthesized peptide
SGGDDDWTHLSSKEVDPST

SEQ ID NO: 3206 - protein, 20 aa, Artificial Sequence
  Artifcially synthesized peptide
SGGDDDWTHLSSKEVDPSTG

SEQ ID NO: 3207 - protein, 21 aa, Artificial Sequence
  Artifcially synthesized peptide
SGGDDDWTHLSSKEVDPSTGE

SEQ ID NO: 3208 - protein, 22 aa, Artificial Sequence
  Artifcially synthesized peptide
SGGDDDWTHLSSKEVDPSTGEL

SEQ ID NO: 3209 - protein, 23 aa, Artificial Sequence
  Artifcially synthesized peptide
SGGDDDWTHLSSKEVDPSTGELQ

SEQ ID NO: 3210 - protein, 8 aa, Artificial Sequence
  Artifcially synthesized peptide
SGPEIFTF

SEQ ID NO: 3211 - protein, 18 aa, Artificial Sequence
  Artifcially synthesized peptide
SGPKPLFRRMSSLVGPTQ

SEQ ID NO: 3212 - protein, 8 aa, Artificial Sequence
  Artifcially synthesized peptide
SIDDPQKL

SEQ ID NO: 3213 - protein, 8 aa, Artificial Sequence
  Artifcially synthesized peptide
SIDSPEKL

SEQ ID NO: 3214 - protein, 8 aa, Artificial Sequence
  Artifcially synthesized peptide
SIDSPQKL

SEQ ID NO: 3215 - protein, 7 aa, Artificial Sequence
  Artifcially synthesized peptide
SIELPSM

SEQ ID NO: 3216 - protein, 10 aa, Artificial Sequence
  Artifcially synthesized peptide
SIGSPVKVGK

SEQ ID NO: 3217 - protein, 9 aa, Artificial Sequence
  Artifcially synthesized peptide
SIISPDFSF

SEQ ID NO: 3218 - protein, 9 aa, Artificial Sequence
  Artifcially synthesized peptide
SILSFVSGL

SEQ ID NO: 3219 - protein, 9 aa, Artificial Sequence
  Artifcially synthesized peptide
SILSRTPSV

SEQ ID NO: 3220 - protein, 9 aa, Artificial Sequence
  Artifcially synthesized peptide
SIMSFHIDL

SEQ ID NO: 3221 - protein, 9 aa, Artificial Sequence
  Artifcially synthesized peptide
SIMSPEIQL

SEQ ID NO: 3222 - protein, 9 aa, Artificial Sequence
  Artifcially synthesized peptide
SIPSGYLEL

SEQ ID NO: 3223 - protein, 9 aa, Artificial Sequence
  Artifcially synthesized peptide
SIPTVSGQI

SEQ ID NO: 3224 - protein, 9 aa, Artificial Sequence
  Artifcially synthesized peptide
SIRYSGHSL

SEQ ID NO: 3225 - protein, 9 aa, Artificial Sequence
  Artifcially synthesized peptide
SISSIDREL

SEQ ID NO: 3226 - protein, 9 aa, Artificial Sequence
  Artifcially synthesized peptide
SISSMEVNV

SEQ ID NO: 3227 - protein, 9 aa, Artificial Sequence
  Artifcially synthesized peptide
SISSTPPAV

SEQ ID NO: 3228 - protein, 9 aa, Artificial Sequence
  Artifcially synthesized peptide
SISSVSNTF

SEQ ID NO: 3229 - protein, 13 aa, Artificial Sequence
  Artifcially synthesized peptide
SITITPPDRYDSL

SEQ ID NO: 3230 - protein, 22 aa, Artificial Sequence
  Artifcially synthesized peptide
SKEDKNGHDGDTHQEDDGEKSD

SEQ ID NO: 3231 - protein, 19 aa, Artificial Sequence
  Artifcially synthesized peptide
SKSPSLSPSPPSPLEKTPL

SEQ ID NO: 3232 - protein, 9 aa, Artificial Sequence
  Artifcially synthesized peptide
SKTVATFIL

SEQ ID NO: 3233 - protein, 9 aa, Artificial Sequence
  Artifcially synthesized peptide
SLSSPTVTL

SEQ ID NO: 3234 - protein, 9 aa, Artificial Sequence
  Artifcially synthesized peptide
SLASLLAKV

SEQ ID NO: 3235 - protein, 9 aa, Artificial Sequence
  Artifcially synthesized peptide
SLASLTEKI

SEQ ID NO: 3236 - protein, 9 aa, Artificial Sequence
  Artifcially synthesized peptide
SLDSSNSGF

SEQ ID NO: 3237 - protein, 9 aa, Artificial Sequence
  Artifcially synthesized peptide
SLDSEDYSL

SEQ ID NO: 3238 - protein, 9 aa, Artificial Sequence
  Artifcially synthesized peptide
SLDSLDLRV

SEQ ID NO: 3239 - protein, 10 aa, Artificial Sequence
  Artifcially synthesized peptide
SLDSLGDVFL

SEQ ID NO: 3240 - protein, 10 aa, Artificial Sequence
  Artifcially synthesized peptide
SLDSPGPEKM

SEQ ID NO: 3241 - protein, 12 aa, Artificial Sequence
  Artifcially synthesized peptide
SLDSPGPEKMAL

SEQ ID NO: 3242 - protein, 10 aa, Artificial Sequence
  Artifcially synthesized peptide
SLDSPSYVLY

SEQ ID NO: 3243 - protein, 11 aa, Artificial Sequence
  Artifcially synthesized peptide
SLDSQQDSMKY

SEQ ID NO: 3244 - protein, 13 aa, Artificial Sequence
  Artifcially synthesized peptide
SLEEPKQANGGAY

SEQ ID NO: 3245 - protein, 10 aa, Artificial Sequence
  Artifcially synthesized peptide
SLESPSYVLY

SEQ ID NO: 3246 - protein, 9 aa, Artificial Sequence
  Artifcially synthesized peptide
SLFGGSVKL

SEQ ID NO: 3247 - protein, 9 aa, Artificial Sequence
  Artifcially synthesized peptide
SLFKRLYSL

SEQ ID NO: 3248 - protein, 10 aa, Artificial Sequence
  Artifcially synthesized peptide
SLFSGDEENA

SEQ ID NO: 3249 - protein, 10 aa, Artificial Sequence
  Artifcially synthesized peptide
SLFSGSYSSL

SEQ ID NO: 3250 - protein, 9 aa, Artificial Sequence
  Artifcially synthesized peptide
SLFSPQNTL

SEQ ID NO: 3251 - protein, 9 aa, Artificial Sequence
  Artifcially synthesized peptide
SLFSPRRNK

SEQ ID NO: 3252 - protein, 9 aa, Artificial Sequence
  Artifcially synthesized peptide
SLFSPRRNY

SEQ ID NO: 3253 - protein, 10 aa, Artificial Sequence
  Artifcially synthesized peptide
SLFSSEESNL

SEQ ID NO: 3254 - protein, 12 aa, Artificial Sequence
  Artifcially synthesized peptide
SLFSSEESNLGA

SEQ ID NO: 3255 - protein, 8 aa, Artificial Sequence
  Artifcially synthesized peptide
SLGPIRSL

SEQ ID NO: 3256 - protein, 9 aa, Artificial Sequence
  Artifcially synthesized peptide
SLHDIQLSL

SEQ ID NO: 3257 - protein, 10 aa, Artificial Sequence
  Artifcially synthesized peptide
SLHSLGSVSL

SEQ ID NO: 3258 - protein, 9 aa, Artificial Sequence
  Artifcially synthesized peptide
SLIDGYYRL

SEQ ID NO: 3259 - protein, 9 aa, Artificial Sequence
  Artifcially synthesized peptide
SLKSPVTVK

SEQ ID NO: 3260 - protein, 11 aa, Artificial Sequence
  Artifcially synthesized peptide
SLLASPGHISV

SEQ ID NO: 3261 - protein, 9 aa, Artificial Sequence
  Artifcially synthesized peptide
SLLHTSRSL

SEQ ID NO: 3262 - protein, 10 aa, Artificial Sequence
  Artifcially synthesized peptide
SLLNKSSPVK

SEQ ID NO: 3263 - protein, 11 aa, Artificial Sequence
  Artifcially synthesized peptide
SLLNKSSPVKK

SEQ ID NO: 3264 - protein, 11 aa, Artificial Sequence
  Artifcially synthesized peptide
SLLNKSSPVKY

SEQ ID NO: 3265 - protein, 9 aa, Artificial Sequence
  Artifcially synthesized peptide
SLLSELQHA

SEQ ID NO: 3266 - protein, 9 aa, Artificial Sequence
  Artifcially synthesized peptide
SLLSLHVDL

SEQ ID NO: 3267 - protein, 9 aa, Artificial Sequence
  Artifcially synthesized peptide
SLLSLQTEL

SEQ ID NO: 3268 - protein, 9 aa, Artificial Sequence
  Artifcially synthesized peptide
SLLSVSHAL

SEQ ID NO: 3269 - protein, 9 aa, Artificial Sequence
  Artifcially synthesized peptide
SLLTSPPKA

SEQ ID NO: 3270 - protein, 9 aa, Artificial Sequence
  Artifcially synthesized peptide
SLLTSPPKV

SEQ ID NO: 3271 - protein, 10 aa, Artificial Sequence
  Artifcially synthesized peptide
SLMSGTLESL

SEQ ID NO: 3272 - protein, 9 aa, Artificial Sequence
  Artifcially synthesized peptide
SLMSPGRRK

SEQ ID NO: 3273 - protein, 9 aa, Artificial Sequence
  Artifcially synthesized peptide
SLMSPGRRY

SEQ ID NO: 3274 - protein, 10 aa, Artificial Sequence
  Artifcially synthesized peptide
SLMTISHPGL

SEQ ID NO: 3275 - protein, 9 aa, Artificial Sequence
  Artifcially synthesized peptide
SLNSSPVSK

SEQ ID NO: 3276 - protein, 9 aa, Artificial Sequence
  Artifcially synthesized peptide
SLQPRSHSV

SEQ ID NO: 3277 - protein, 9 aa, Artificial Sequence
  Artifcially synthesized peptide
SLQSLETSV

SEQ ID NO: 3278 - protein, 9 aa, Artificial Sequence
  Artifcially synthesized peptide
SLRRSVLMK

SEQ ID NO: 3279 - protein, 9 aa, Artificial Sequence
  Artifcially synthesized peptide
SLRRSVLMY

SEQ ID NO: 3280 - protein, 9 aa, Artificial Sequence
  Artifcially synthesized peptide
SLSSERYYL

SEQ ID NO: 3281 - protein, 9 aa, Artificial Sequence
  Artifcially synthesized peptide
SLSSLLVKL

SEQ ID NO: 3282 - protein, 9 aa, Artificial Sequence
  Artifcially synthesized peptide
SLTRSPPRV

SEQ ID NO: 3283 - protein, 9 aa, Artificial Sequence
  Artifcially synthesized peptide
SLVDGYFRL

SEQ ID NO: 3284 - protein, 9 aa, Artificial Sequence
  Artifcially synthesized peptide
SLYDRPASY

SEQ ID NO: 3285 - protein, 9 aa, Artificial Sequence
  Artifcially synthesized peptide
SLYSPVKKK

SEQ ID NO: 3286 - protein, 9 aa, Artificial Sequence
  Artifcially synthesized peptide
SMFSPRRNK

SEQ ID NO: 3287 - protein, 11 aa, Artificial Sequence
  Artifcially synthesized peptide
SMKSPLYLVSR

SEQ ID NO: 3288 - protein, 9 aa, Artificial Sequence
  Artifcially synthesized peptide
SMKSPVTVK

SEQ ID NO: 3289 - protein, 10 aa, Artificial Sequence
  Artifcially synthesized peptide
SMLNKSSPVK

SEQ ID NO: 3290 - protein, 11 aa, Artificial Sequence
  Artifcially synthesized peptide
SMLNKSSPVKK

SEQ ID NO: 3291 - protein, 10 aa, Artificial Sequence
  Artifcially synthesized peptide
SMLSQEIQTL

SEQ ID NO: 3292 - protein, 9 aa, Artificial Sequence
  Artifcially synthesized peptide
SMLTSPPKA

SEQ ID NO: 3293 - protein, 9 aa, Artificial Sequence
  Artifcially synthesized peptide
SMLTSPPKV

SEQ ID NO: 3294 - protein, 9 aa, Artificial Sequence
  Artifcially synthesized peptide
SMMSPGRRK

SEQ ID NO: 3295 - protein, 9 aa, Artificial Sequence
  Artifcially synthesized peptide
SMQPRSHSV

SEQ ID NO: 3296 - protein, 9 aa, Artificial Sequence
  Artifcially synthesized peptide
SMRRSVLMK

SEQ ID NO: 3297 - protein, 9 aa, Artificial Sequence
  Artifcially synthesized peptide
SMSSLSREV

SEQ ID NO: 3298 - protein, 9 aa, Artificial Sequence
  Artifcially synthesized peptide
SMTRSPPRV

SEQ ID NO: 3299 - protein, 9 aa, Artificial Sequence
  Artifcially synthesized peptide
SMYSPVKKK

SEQ ID NO: 3300 - protein, 11 aa, Artificial Sequence
  Artifcially synthesized peptide
SNFKSPVKTIR

SEQ ID NO: 3301 - protein, 11 aa, Artificial Sequence
  Artifcially synthesized peptide
SPSSPSVRRQL

SEQ ID NO: 3302 - protein, 18 aa, Artificial Sequence
  Artifcially synthesized peptide
SPAASISRLSGEQVDGKG

SEQ ID NO: 3303 - protein, 9 aa, Artificial Sequence
  Artifcially synthesized peptide
SPASPKISF

SEQ ID NO: 3304 - protein, 9 aa, Artificial Sequence
  Artifcially synthesized peptide
SPASPKISL

SEQ ID NO: 3305 - protein, 9 aa, Artificial Sequence
  Artifcially synthesized peptide
SPASPKISM

SEQ ID NO: 3306 - protein, 9 aa, Artificial Sequence
  Artifcially synthesized peptide
SPASPKISV

SEQ ID NO: 3307 - protein, 9 aa, Artificial Sequence
  Artifcially synthesized peptide
SPASPLKEL

SEQ ID NO: 3308 - protein, 9 aa, Artificial Sequence
  Artifcially synthesized peptide
SPDSSQSSL

SEQ ID NO: 3309 - protein, 9 aa, Artificial Sequence
  Artifcially synthesized peptide
SPDHSDHTL

SEQ ID NO: 3310 - protein, 9 aa, Artificial Sequence
  Artifcially synthesized peptide
SPDSSQSSL

SEQ ID NO: 3311 - protein, 17 aa, Artificial Sequence
  Artifcially synthesized peptide
SPEDEYELLMPHRISSH

SEQ ID NO: 3312 - protein, 11 aa, Artificial Sequence
  Artifcially synthesized peptide
SPEKAGRRSSF

SEQ ID NO: 3313 - protein, 11 aa, Artificial Sequence
  Artifcially synthesized peptide
SPEKAGRRSSL

SEQ ID NO: 3314 - protein, 11 aa, Artificial Sequence
  Artifcially synthesized peptide
SPEKAGRRSSM

SEQ ID NO: 3315 - protein, 11 aa, Artificial Sequence
  Artifcially synthesized peptide
SPEKAGRRSSV

SEQ ID NO: 3316 - protein, 18 aa, Artificial Sequence
  Artifcially synthesized peptide
SPERPFLAILGGAKVADK

SEQ ID NO: 3317 - protein, 20 aa, Artificial Sequence
  Artifcially synthesized peptide
SPERPFLAILGGAKVADKIQ

SEQ ID NO: 3318 - protein, 9 aa, Artificial Sequence
  Artifcially synthesized peptide
SPFKRQLSF

SEQ ID NO: 3319 - protein, 9 aa, Artificial Sequence
  Artifcially synthesized peptide
SPFKRQLSL

SEQ ID NO: 3320 - protein, 9 aa, Artificial Sequence
  Artifcially synthesized peptide
SPFKRQLSM

SEQ ID NO: 3321 - protein, 9 aa, Artificial Sequence
  Artifcially synthesized peptide
SPFKRQLSV

SEQ ID NO: 3322 - protein, 9 aa, Artificial Sequence
  Artifcially synthesized peptide
SPFLSKRSL

SEQ ID NO: 3323 - protein, 10 aa, Artificial Sequence
  Artifcially synthesized peptide
SPFSSRSPSL

SEQ ID NO: 3324 - protein, 10 aa, Artificial Sequence
  Artifcially synthesized peptide
SPGLARKRSF

SEQ ID NO: 3325 - protein, 10 aa, Artificial Sequence
  Artifcially synthesized peptide
SPGLARKRSL

SEQ ID NO: 3326 - protein, 10 aa, Artificial Sequence
  Artifcially synthesized peptide
SPGLARKRSM

SEQ ID NO: 3327 - protein, 10 aa, Artificial Sequence
  Artifcially synthesized peptide
SPGLARKRSV

SEQ ID NO: 3328 - protein, 9 aa, Artificial Sequence
  Artifcially synthesized peptide
SPGSPRPAF

SEQ ID NO: 3329 - protein, 9 aa, Artificial Sequence
  Artifcially synthesized peptide
SPGSPRPAL

SEQ ID NO: 3330 - protein, 9 aa, Artificial Sequence
  Artifcially synthesized peptide
SPGSPRPAM

SEQ ID NO: 3331 - protein, 9 aa, Artificial Sequence
  Artifcially synthesized peptide
SPGSPRPAV

SEQ ID NO: 3332 - protein, 9 aa, Artificial Sequence
  Artifcially synthesized peptide
SPHSPFYQL

SEQ ID NO: 3333 - protein, 11 aa, Artificial Sequence
  Artifcially synthesized peptide
SPHYFSPFRPY

SEQ ID NO: 3334 - protein, 11 aa, Artificial Sequence
  Artifcially synthesized peptide
SPIAPRSPAKL

SEQ ID NO: 3335 - protein, 7 aa, Artificial Sequence
  Artifcially synthesized peptide
SPIKVTL

SEQ ID NO: 3336 - protein, 9 aa, Artificial Sequence
  Artifcially synthesized peptide
SPKPPTRSP

SEQ ID NO: 3337 - protein, 12 aa, Artificial Sequence
  Artifcially synthesized peptide
SPKSGSPKSSSL

SEQ ID NO: 3338 - protein, 9 aa, Artificial Sequence
  Artifcially synthesized peptide
SPKSPGLKA

SEQ ID NO: 3339 - protein, 10 aa, Artificial Sequence
  Artifcially synthesized peptide
SPKSPGLKAM

SEQ ID NO: 3340 - protein, 9 aa, Artificial Sequence
  Artifcially synthesized peptide
SPKSPGLKF

SEQ ID NO: 3341 - protein, 9 aa, Artificial Sequence
  Artifcially synthesized peptide
SPKSPGLKL

SEQ ID NO: 3342 - protein, 9 aa, Artificial Sequence
  Artifcially synthesized peptide
SPKSPGLKM

SEQ ID NO: 3343 - protein, 9 aa, Artificial Sequence
  Artifcially synthesized peptide
SPKSPGLKV

SEQ ID NO: 3344 - protein, 9 aa, Artificial Sequence
  Artifcially synthesized peptide
SPKSPTAAF

SEQ ID NO: 3345 - protein, 9 aa, Artificial Sequence
  Artifcially synthesized peptide
SPKSPTAAL

SEQ ID NO: 3346 - protein, 9 aa, Artificial Sequence
  Artifcially synthesized peptide
SPKSPTAAM

SEQ ID NO: 3347 - protein, 9 aa, Artificial Sequence
  Artifcially synthesized peptide
SPKSPTAAV

SEQ ID NO: 3348 - protein, 10 aa, Artificial Sequence
  Artifcially synthesized peptide
SPLSKIGIEL

SEQ ID NO: 3349 - protein, 9 aa, Artificial Sequence
  Artifcially synthesized peptide
SPLSPTETF

SEQ ID NO: 3350 - protein, 9 aa, Artificial Sequence
  Artifcially synthesized peptide
SPLTKSISL

SEQ ID NO: 3351 - protein, 10 aa, Artificial Sequence
  Artifcially synthesized peptide
SPPDSPGRTL

SEQ ID NO: 3352 - protein, 19 aa, Artificial Sequence
  Artifcially synthesized peptide
SPPFPVPVYTRQAPKQVIK

SEQ ID NO: 3353 - protein, 10 aa, Artificial Sequence
  Artifcially synthesized peptide
SPPSPARWSL

SEQ ID NO: 3354 - protein, 11 aa, Artificial Sequence
  Artifcially synthesized peptide
SPPSPLEKTPL

SEQ ID NO: 3355 - protein, 11 aa, Artificial Sequence
  Artifcially synthesized peptide
SPRAPVSPLKF

SEQ ID NO: 3356 - protein, 9 aa, Artificial Sequence
  Artifcially synthesized peptide
SPRERSPAL

SEQ ID NO: 3357 - protein, 9 aa, Artificial Sequence
  Artifcially synthesized peptide
SPRGEASSL

SEQ ID NO: 3358 - protein, 11 aa, Artificial Sequence
  Artifcially synthesized peptide
SPRGSGSSTSL

SEQ ID NO: 3359 - protein, 10 aa, Artificial Sequence
  Artifcially synthesized peptide
SPRLPRSPRL

SEQ ID NO: 3360 - protein, 10 aa, Artificial Sequence
  Artifcially synthesized peptide
SPRPPNSPSI

SEQ ID NO: 3361 - protein, 12 aa, Artificial Sequence
  Artifcially synthesized peptide
SPRPPNSPSISI

SEQ ID NO: 3362 - protein, 10 aa, Artificial Sequence
  Artifcially synthesized peptide
SPRRSLGLAL

SEQ ID NO: 3363 - protein, 10 aa, Artificial Sequence
  Artifcially synthesized peptide
SPRRSRSISF

SEQ ID NO: 3364 - protein, 10 aa, Artificial Sequence
  Artifcially synthesized peptide
SPRRSRSISL

SEQ ID NO: 3365 - protein, 10 aa, Artificial Sequence
  Artifcially synthesized peptide
SPRRSRSISM

SEQ ID NO: 3366 - protein, 10 aa, Artificial Sequence
  Artifcially synthesized peptide
SPRRSRSISV

SEQ ID NO: 3367 - protein, 9 aa, Artificial Sequence
  Artifcially synthesized peptide
SPRSESGGL

SEQ ID NO: 3368 - protein, 9 aa, Artificial Sequence
  Artifcially synthesized peptide
SPRSITSTF

SEQ ID NO: 3369 - protein, 9 aa, Artificial Sequence
  Artifcially synthesized peptide
SPRSITSTL

SEQ ID NO: 3370 - protein, 9 aa, Artificial Sequence
  Artifcially synthesized peptide
SPRSITSTM

SEQ ID NO: 3371 - protein, 9 aa, Artificial Sequence
  Artifcially synthesized peptide
SPRSITSTP

SEQ ID NO: 3372 - protein, 9 aa, Artificial Sequence
  Artifcially synthesized peptide
SPRSITSTV

SEQ ID NO: 3373 - protein, 9 aa, Artificial Sequence
  Artifcially synthesized peptide
SPRSPDRTL

SEQ ID NO: 3374 - protein, 9 aa, Artificial Sequence
  Artifcially synthesized peptide
SPRSPGKPF

SEQ ID NO: 3375 - protein, 9 aa, Artificial Sequence
  Artifcially synthesized peptide
SPRSPGKPL

SEQ ID NO: 3376 - protein, 9 aa, Artificial Sequence
  Artifcially synthesized peptide
SPRSPGKPM

SEQ ID NO: 3377 - protein, 9 aa, Artificial Sequence
  Artifcially synthesized peptide
SPRSPGKPV

SEQ ID NO: 3378 - protein, 14 aa, Artificial Sequence
  Artifcially synthesized peptide
SPRSPGPLPGARGL

SEQ ID NO: 3379 - protein, 9 aa, Artificial Sequence
  Artifcially synthesized peptide
SPRSPGRSF

SEQ ID NO: 3380 - protein, 9 aa, Artificial Sequence
  Artifcially synthesized peptide
SPRSPGRSL

SEQ ID NO: 3381 - protein, 9 aa, Artificial Sequence
  Artifcially synthesized peptide
SPRSPGRSM

SEQ ID NO: 3382 - protein, 9 aa, Artificial Sequence
  Artifcially synthesized peptide
SPRSPGRSV

SEQ ID NO: 3383 - protein, 10 aa, Artificial Sequence
  Artifcially synthesized peptide
SPRSPISPEL

SEQ ID NO: 3384 - protein, 9 aa, Artificial Sequence
  Artifcially synthesized peptide
SPRSPSGLR

SEQ ID NO: 3385 - protein, 10 aa, Artificial Sequence
  Artifcially synthesized peptide
SPRSPSTTYF

SEQ ID NO: 3386 - protein, 10 aa, Artificial Sequence
  Artifcially synthesized peptide
SPRSPSTTYL

SEQ ID NO: 3387 - protein, 10 aa, Artificial Sequence
  Artifcially synthesized peptide
SPRSPSTTYM

SEQ ID NO: 3388 - protein, 10 aa, Artificial Sequence
  Artifcially synthesized peptide
SPRSPSTTYV

SEQ ID NO: 3389 - protein, 9 aa, Artificial Sequence
  Artifcially synthesized peptide
SPRSPTPSY

SEQ ID NO: 3390 - protein, 10 aa, Artificial Sequence
  Artifcially synthesized peptide
SPRSPVPTTL

SEQ ID NO: 3391 - protein, 8 aa, Artificial Sequence
  Artifcially synthesized peptide
SPRSSQLV

SEQ ID NO: 3392 - protein, 9 aa, Artificial Sequence
  Artifcially synthesized peptide
SPRTPPQRF

SEQ ID NO: 3393 - protein, 9 aa, Artificial Sequence
  Artifcially synthesized peptide
SPRTPSNTP

SEQ ID NO: 3394 - protein, 12 aa, Artificial Sequence
  Artifcially synthesized peptide
SPRTPTPFKHAL

SEQ ID NO: 3395 - protein, 11 aa, Artificial Sequence
  Artifcially synthesized peptide
SPRTPVSPVKF

SEQ ID NO: 3396 - protein, 11 aa, Artificial Sequence
  Artifcially synthesized peptide
SPRTPVSPVKL

SEQ ID NO: 3397 - protein, 11 aa, Artificial Sequence
  Artifcially synthesized peptide
SPRTPVSPVKM

SEQ ID NO: 3398 - protein, 11 aa, Artificial Sequence
  Artifcially synthesized peptide
SPRTPVSPVKV

SEQ ID NO: 3399 - protein, 9 aa, Artificial Sequence
  Artifcially synthesized peptide
SPSFGDPQL

SEQ ID NO: 3400 - protein, 21 aa, Artificial Sequence
  Artifcially synthesized peptide
SPSKSPSLSPSPPSPLEKTPL

SEQ ID NO: 3401 - protein, 17 aa, Artificial Sequence
  Artifcially synthesized peptide
SPSLSPSPPSPLEKTPL

SEQ ID NO: 3402 - protein, 9 aa, Artificial Sequence
  Artifcially synthesized peptide
SPSSPRVRL

SEQ ID NO: 3403 - protein, 11 aa, Artificial Sequence
  Artifcially synthesized peptide
SPSSPSVRRQF

SEQ ID NO: 3404 - protein, 11 aa, Artificial Sequence
  Artifcially synthesized peptide
SPSSPSVRRQL

SEQ ID NO: 3405 - protein, 11 aa, Artificial Sequence
  Artifcially synthesized peptide
SPSSPSVRRQM

SEQ ID NO: 3406 - protein, 11 aa, Artificial Sequence
  Artifcially synthesized peptide
SPSSPSVRRQV

SEQ ID NO: 3407 - protein, 13 aa, Artificial Sequence
  Artifcially synthesized peptide
SPSTSRSGGSSRF

SEQ ID NO: 3408 - protein, 13 aa, Artificial Sequence
  Artifcially synthesized peptide
SPSTSRSGGSSRL

SEQ ID NO: 3409 - protein, 13 aa, Artificial Sequence
  Artifcially synthesized peptide
SPSTSRSGGSSRM

SEQ ID NO: 3410 - protein, 13 aa, Artificial Sequence
  Artifcially synthesized peptide
SPSTSRSGGSSRV

SEQ ID NO: 3411 - protein, 13 aa, Artificial Sequence
  Artifcially synthesized peptide
SPTRPNPPVRNLH

SEQ ID NO: 3412 - protein, 9 aa, Artificial Sequence
  Artifcially synthesized peptide
SPTSPFSSL

SEQ ID NO: 3413 - protein, 11 aa, Artificial Sequence
  Artifcially synthesized peptide
SPVNKVRRVSF

SEQ ID NO: 3414 - protein, 9 aa, Artificial Sequence
  Artifcially synthesized peptide
SPVSPMKEL

SEQ ID NO: 3415 - protein, 8 aa, Artificial Sequence
  Artifcially synthesized peptide
SPVVHQSF

SEQ ID NO: 3416 - protein, 8 aa, Artificial Sequence
  Artifcially synthesized peptide
SPVVHQSL

SEQ ID NO: 3417 - protein, 8 aa, Artificial Sequence
  Artifcially synthesized peptide
SPVVHQSM

SEQ ID NO: 3418 - protein, 8 aa, Artificial Sequence
  Artifcially synthesized peptide
SPVVHQSV

SEQ ID NO: 3419 - protein, 18 aa, Artificial Sequence
  Artifcially synthesized peptide
SQAASSDSAQGSDVSLTA

SEQ ID NO: 3420 - protein, 8 aa, Artificial Sequence
  Artifcially synthesized peptide
SQDSPRKL

SEQ ID NO: 3421 - protein, 9 aa, Artificial Sequence
  Artifcially synthesized peptide
SQILRTPSL

SEQ ID NO: 3422 - protein, 10 aa, Artificial Sequence
  Artifcially synthesized peptide
SQISPKSWGV

SEQ ID NO: 3423 - protein, 9 aa, Artificial Sequence
  Artifcially synthesized peptide
SRSSSVLSL

SEQ ID NO: 3424 - protein, 8 aa, Artificial Sequence
  Artifcially synthesized peptide
SRDKHSEY

SEQ ID NO: 3425 - protein, 8 aa, Artificial Sequence
  Artifcially synthesized peptide
SREKHSEI

SEQ ID NO: 3426 - protein, 9 aa, Artificial Sequence
  Artifcially synthesized peptide
SRFNRRVSV

SEQ ID NO: 3427 - protein, 10 aa, Artificial Sequence
  Artifcially synthesized peptide
SRHSGPFFTF

SEQ ID NO: 3428 - protein, 9 aa, Artificial Sequence
  Artifcially synthesized peptide
SRIPLVRSF

SEQ ID NO: 3429 - protein, 9 aa, Artificial Sequence
  Artifcially synthesized peptide
SRKSFVFEL

SEQ ID NO: 3430 - protein, 9 aa, Artificial Sequence
  Artifcially synthesized peptide
SRLSLRRSL

SEQ ID NO: 3431 - protein, 8 aa, Artificial Sequence
  Artifcially synthesized peptide
SRLTHLSF

SEQ ID NO: 3432 - protein, 8 aa, Artificial Sequence
  Artifcially synthesized peptide
SRLTHLSK

SEQ ID NO: 3433 - protein, 8 aa, Artificial Sequence
  Artifcially synthesized peptide
SRLTHLSL

SEQ ID NO: 3434 - protein, 8 aa, Artificial Sequence
  Artifcially synthesized peptide
SRLTHLSM

SEQ ID NO: 3435 - protein, 8 aa, Artificial Sequence
  Artifcially synthesized peptide
SRLTHLSR

SEQ ID NO: 3436 - protein, 8 aa, Artificial Sequence
  Artifcially synthesized peptide
SRLTHLSY

SEQ ID NO: 3437 - protein, 9 aa, Artificial Sequence
  Artifcially synthesized peptide
SRMSPKAQF

SEQ ID NO: 3438 - protein, 9 aa, Artificial Sequence
  Artifcially synthesized peptide
SRMSPKAQK

SEQ ID NO: 3439 - protein, 9 aa, Artificial Sequence
  Artifcially synthesized peptide
SRMSPKAQL

SEQ ID NO: 3440 - protein, 9 aa, Artificial Sequence
  Artifcially synthesized peptide
SRMSPKAQM

SEQ ID NO: 3441 - protein, 9 aa, Artificial Sequence
  Artifcially synthesized peptide
SRMSPKAQR

SEQ ID NO: 3442 - protein, 9 aa, Artificial Sequence
  Artifcially synthesized peptide
SRMSPKAQY

SEQ ID NO: 3443 - protein, 9 aa, Artificial Sequence
  Artifcially synthesized peptide
SRNQSPQRL

SEQ ID NO: 3444 - protein, 10 aa, Artificial Sequence
  Artifcially synthesized peptide
SRPSMSPTPL

SEQ ID NO: 3445 - protein, 9 aa, Artificial Sequence
  Artifcially synthesized peptide
SRPSSSRSY

SEQ ID NO: 3446 - protein, 9 aa, Artificial Sequence
  Artifcially synthesized peptide
SRSSSVLSL

SEQ ID NO: 3447 - protein, 9 aa, Artificial Sequence
  Artifcially synthesized peptide
SRTSPITRF

SEQ ID NO: 3448 - protein, 9 aa, Artificial Sequence
  Artifcially synthesized peptide
SRTSPITRK

SEQ ID NO: 3449 - protein, 9 aa, Artificial Sequence
  Artifcially synthesized peptide
SRTSPITRL

SEQ ID NO: 3450 - protein, 9 aa, Artificial Sequence
  Artifcially synthesized peptide
SRTSPITRM

SEQ ID NO: 3451 - protein, 9 aa, Artificial Sequence
  Artifcially synthesized peptide
SRTSPITRR

SEQ ID NO: 3452 - protein, 9 aa, Artificial Sequence
  Artifcially synthesized peptide
SRTSPITRY

SEQ ID NO: 3453 - protein, 9 aa, Artificial Sequence
  Artifcially synthesized peptide
SRWSGSHQF

SEQ ID NO: 3454 - protein, 9 aa, Artificial Sequence
  Artifcially synthesized peptide
SRWSGSHQK

SEQ ID NO: 3455 - protein, 9 aa, Artificial Sequence
  Artifcially synthesized peptide
SRWSGSHQR

SEQ ID NO: 3456 - protein, 9 aa, Artificial Sequence
  Artifcially synthesized peptide
SRWSGSHQY

SEQ ID NO: 3457 - protein, 10 aa, Artificial Sequence
  Artifcially synthesized peptide
SRYSGVNQSM

SEQ ID NO: 3458 - protein, 10 aa, Artificial Sequence
  Artifcially synthesized peptide
SRYSRSPYSF

SEQ ID NO: 3459 - protein, 10 aa, Artificial Sequence
  Artifcially synthesized peptide
SRYSRSPYSK

SEQ ID NO: 3460 - protein, 10 aa, Artificial Sequence
  Artifcially synthesized peptide
SRYSRSPYSL

SEQ ID NO: 3461 - protein, 10 aa, Artificial Sequence
  Artifcially synthesized peptide
SRYSRSPYSM

SEQ ID NO: 3462 - protein, 10 aa, Artificial Sequence
  Artifcially synthesized peptide
SRYSRSPYSR

SEQ ID NO: 3463 - protein, 10 aa, Artificial Sequence
  Artifcially synthesized peptide
SRYSRSPYSY

SEQ ID NO: 3464 - protein, 9 aa, Artificial Sequence
  Artifcially synthesized peptide
SSAVDTLRS

SEQ ID NO: 3465 - protein, 9 aa, Artificial Sequence
  Artifcially synthesized peptide
SSDISPTRL

SEQ ID NO: 3466 - protein, 9 aa, Artificial Sequence
  Artifcially synthesized peptide
SSDISPTRY

SEQ ID NO: 3467 - protein, 8 aa, Artificial Sequence
  Artifcially synthesized peptide
SSDKHSEY

SEQ ID NO: 3468 - protein, 10 aa, Artificial Sequence
  Artifcially synthesized peptide
SSDPASQLSY

SEQ ID NO: 3469 - protein, 14 aa, Artificial Sequence
  Artifcially synthesized peptide
SSDSAQGSDVSLTA

SEQ ID NO: 3470 - protein, 9 aa, Artificial Sequence
  Artifcially synthesized peptide
SSDSETLRY

SEQ ID NO: 3471 - protein, 12 aa, Artificial Sequence
  Artifcially synthesized peptide
SSDSPPRPQPAF

SEQ ID NO: 3472 - protein, 8 aa, Artificial Sequence
  Artifcially synthesized peptide
SSDSPQKL

SEQ ID NO: 3473 - protein, 8 aa, Artificial Sequence
  Artifcially synthesized peptide
SSDSPQKY

SEQ ID NO: 3474 - protein, 10 aa, Artificial Sequence
  Artifcially synthesized peptide
SSDSPSYVLY

SEQ ID NO: 3475 - protein, 9 aa, Artificial Sequence
  Artifcially synthesized peptide
SSDSPTNHF

SEQ ID NO: 3476 - protein, 10 aa, Artificial Sequence
  Artifcially synthesized peptide
SSDSPTNHFF

SEQ ID NO: 3477 - protein, 9 aa, Artificial Sequence
  Artifcially synthesized peptide
SSEISPTRY

SEQ ID NO: 3478 - protein, 8 aa, Artificial Sequence
  Artifcially synthesized peptide
SSEKHSEY

SEQ ID NO: 3479 - protein, 10 aa, Artificial Sequence
  Artifcially synthesized peptide
SSEPASQLSY

SEQ ID NO: 3480 - protein, 9 aa, Artificial Sequence
  Artifcially synthesized peptide
SSESETLRY

SEQ ID NO: 3481 - protein, 8 aa, Artificial Sequence
  Artifcially synthesized peptide
SSESPQKL

SEQ ID NO: 3482 - protein, 8 aa, Artificial Sequence
  Artifcially synthesized peptide
SSESPQKY

SEQ ID NO: 3483 - protein, 10 aa, Artificial Sequence
  Artifcially synthesized peptide
SSESPSYVLY

SEQ ID NO: 3484 - protein, 10 aa, Artificial Sequence
  Artifcially synthesized peptide
SSESPTNHFY

SEQ ID NO: 3485 - protein, 13 aa, Artificial Sequence
  Artifcially synthesized peptide
SSGRSPSKAVAAR

SEQ ID NO: 3486 - protein, 9 aa, Artificial Sequence
  Artifcially synthesized peptide
SSIPSTLSL

SEQ ID NO: 3487 - protein, 8 aa, Artificial Sequence
  Artifcially synthesized peptide
SSISPVRL

SEQ ID NO: 3488 - protein, 9 aa, Artificial Sequence
  Artifcially synthesized peptide
SSLPRYLGL

SEQ ID NO: 3489 - protein, 9 aa, Artificial Sequence
  Artifcially synthesized peptide
SSMKSPLYL

SEQ ID NO: 3490 - protein, 9 aa, Artificial Sequence
  Artifcially synthesized peptide
SSMSPLPQM

SEQ ID NO: 3491 - protein, 17 aa, Artificial Sequence
  Artifcially synthesized peptide
SSNGKMASRRSEEKEAG

SEQ ID NO: 3492 - protein, 19 aa, Artificial Sequence
  Artifcially synthesized peptide
SSNGKMASRRSEEKEAGEI

SEQ ID NO: 3493 - protein, 7 aa, Artificial Sequence
  Artifcially synthesized peptide
SSPEFFM

SEQ ID NO: 3494 - protein, 11 aa, Artificial Sequence
  Artifcially synthesized peptide
SSPIMRKKVSL

SEQ ID NO: 3495 - protein, 20 aa, Artificial Sequence
  Artifcially synthesized peptide
SSPPFPVPVYTRQAPKQVIK

SEQ ID NO: 3496 - protein, 10 aa, Artificial Sequence
  Artifcially synthesized peptide
SSPRSPTTTL

SEQ ID NO: 3497 - protein, 9 aa, Artificial Sequence
  Artifcially synthesized peptide
SSSGSPHLY

SEQ ID NO: 3498 - protein, 12 aa, Artificial Sequence
  Artifcially synthesized peptide
SSSPTHAKSAHV

SEQ ID NO: 3499 - protein, 11 aa, Artificial Sequence
  Artifcially synthesized peptide
SSSSSGSPHLY

SEQ ID NO: 3500 - protein, 16 aa, Artificial Sequence
  Artifcially synthesized peptide
SSSWRILGSKQSEHRP

SEQ ID NO: 3501 - protein, 9 aa, Artificial Sequence
  Artifcially synthesized peptide
SSVPGVRLL

SEQ ID NO: 3502 - protein, 10 aa, Artificial Sequence
  Artifcially synthesized peptide
SSVPGVRLLQ

SEQ ID NO: 3503 - protein, 11 aa, Artificial Sequence
  Artifcially synthesized peptide
SSVPGVRLLQD

SEQ ID NO: 3504 - protein, 14 aa, Artificial Sequence
  Artifcially synthesized peptide
SSVPGVRLLQDSVD

SEQ ID NO: 3505 - protein, 9 aa, Artificial Sequence
  Artifcially synthesized peptide
SSVSPAVSK

SEQ ID NO: 3506 - protein, 9 aa, Artificial Sequence
  Artifcially synthesized peptide
SSYPRPLTY

SEQ ID NO: 3507 - protein, 9 aa, Artificial Sequence
  Artifcially synthesized peptide
STDISPTRL

SEQ ID NO: 3508 - protein, 9 aa, Artificial Sequence
  Artifcially synthesized peptide
STDISPTRY

SEQ ID NO: 3509 - protein, 8 aa, Artificial Sequence
  Artifcially synthesized peptide
STDKHSEY

SEQ ID NO: 3510 - protein, 10 aa, Artificial Sequence
  Artifcially synthesized peptide
STDPASQLSY

SEQ ID NO: 3511 - protein, 9 aa, Artificial Sequence
  Artifcially synthesized peptide
STDSETLRY

SEQ ID NO: 3512 - protein, 11 aa, Artificial Sequence
  Artifcially synthesized peptide
STDSGLGLGCY

SEQ ID NO: 3513 - protein, 8 aa, Artificial Sequence
  Artifcially synthesized peptide
STDSPQKY

SEQ ID NO: 3514 - protein, 8 aa, Artificial Sequence
  Artifcially synthesized peptide
STDSPRLL

SEQ ID NO: 3515 - protein, 10 aa, Artificial Sequence
  Artifcially synthesized peptide
STDSPSYVLY

SEQ ID NO: 3516 - protein, 10 aa, Artificial Sequence
  Artifcially synthesized peptide
STDSPTNHFY

SEQ ID NO: 3517 - protein, 9 aa, Artificial Sequence
  Artifcially synthesized peptide
STEISPTRL

SEQ ID NO: 3518 - protein, 9 aa, Artificial Sequence
  Artifcially synthesized peptide
STEISPTRY

SEQ ID NO: 3519 - protein, 8 aa, Artificial Sequence
  Artifcially synthesized peptide
STEKHSEY

SEQ ID NO: 3520 - protein, 10 aa, Artificial Sequence
  Artifcially synthesized peptide
STEPASQLSY

SEQ ID NO: 3521 - protein, 9 aa, Artificial Sequence
  Artifcially synthesized peptide
STESETLRY

SEQ ID NO: 3522 - protein, 8 aa, Artificial Sequence
  Artifcially synthesized peptide
STESPQKY

SEQ ID NO: 3523 - protein, 10 aa, Artificial Sequence
  Artifcially synthesized peptide
STESPSYVLY

SEQ ID NO: 3524 - protein, 10 aa, Artificial Sequence
  Artifcially synthesized peptide
STESPTNHFY

SEQ ID NO: 3525 - protein, 10 aa, Artificial Sequence
  Artifcially synthesized peptide
STFSTNYRSL

SEQ ID NO: 3526 - protein, 9 aa, Artificial Sequence
  Artifcially synthesized peptide
STIAILNSV

SEQ ID NO: 3527 - protein, 10 aa, Artificial Sequence
  Artifcially synthesized peptide
STIQNSPTKK

SEQ ID NO: 3528 - protein, 12 aa, Artificial Sequence
  Artifcially synthesized peptide
STISLVTGETER

SEQ ID NO: 3529 - protein, 10 aa, Artificial Sequence
  Artifcially synthesized peptide
STISPSGAFG

SEQ ID NO: 3530 - protein, 12 aa, Artificial Sequence
  Artifcially synthesized peptide
STISPSGAFGLF

SEQ ID NO: 3531 - protein, 9 aa, Artificial Sequence
  Artifcially synthesized peptide
STKSTELLL

SEQ ID NO: 3532 - protein, 10 aa, Artificial Sequence
  Artifcially synthesized peptide
STLLASPMLK

SEQ ID NO: 3533 - protein, 10 aa, Artificial Sequence
  Artifcially synthesized peptide
STMSLNIITV

SEQ ID NO: 3534 - protein, 9 aa, Artificial Sequence
  Artifcially synthesized peptide
STPSGYLEL

SEQ ID NO: 3535 - protein, 9 aa, Artificial Sequence
  Artifcially synthesized peptide
SVSSLEVHF

SEQ ID NO: 3536 - protein, 8 aa, Artificial Sequence
  Artifcially synthesized peptide
SVASPLTL

SEQ ID NO: 3537 - protein, 9 aa, Artificial Sequence
  Artifcially synthesized peptide
SVDISPTRL

SEQ ID NO: 3538 - protein, 9 aa, Artificial Sequence
  Artifcially synthesized peptide
SVDISPTRY

SEQ ID NO: 3539 - protein, 11 aa, Artificial Sequence
  Artifcially synthesized peptide
SVFRHFGSFQK

SEQ ID NO: 3540 - protein, 9 aa, Artificial Sequence
  Artifcially synthesized peptide
SVFSPSFGL

SEQ ID NO: 3541 - protein, 12 aa, Artificial Sequence
  Artifcially synthesized peptide
SVGSDDELGPIR

SEQ ID NO: 3542 - protein, 10 aa, Artificial Sequence
  Artifcially synthesized peptide
SVGSDYYIQL

SEQ ID NO: 3543 - protein, 9 aa, Artificial Sequence
  Artifcially synthesized peptide
SVINVFVGR

SEQ ID NO: 3544 - protein, 9 aa, Artificial Sequence
  Artifcially synthesized peptide
SVISDDSVL

SEQ ID NO: 3545 - protein, 10 aa, Artificial Sequence
  Artifcially synthesized peptide
SVISQERLSY

SEQ ID NO: 3546 - protein, 4 aa, Artificial Sequence
  Artifcially synthesized peptide
SVIS

SEQ ID NO: 3547 - protein, 9 aa, Artificial Sequence
  Artifcially synthesized peptide
SVKSPVTVK

SEQ ID NO: 3548 - protein, 9 aa, Artificial Sequence
  Artifcially synthesized peptide
SVKSPVTVY

SEQ ID NO: 3549 - protein, 9 aa, Artificial Sequence
  Artifcially synthesized peptide
SVLPRALSL

SEQ ID NO: 3550 - protein, 9 aa, Artificial Sequence
  Artifcially synthesized peptide
SVLSPSFQL

SEQ ID NO: 3551 - protein, 9 aa, Artificial Sequence
  Artifcially synthesized peptide
SVLSYTSVR

SEQ ID NO: 3552 - protein, 9 aa, Artificial Sequence
  Artifcially synthesized peptide
SVLVRQISL

SEQ ID NO: 3553 - protein, 9 aa, Artificial Sequence
  Artifcially synthesized peptide
SVMDSPKKL

SEQ ID NO: 3554 - protein, 10 aa, Artificial Sequence
  Artifcially synthesized peptide
SVMQSPLVGV

SEQ ID NO: 3555 - protein, 13 aa, Artificial Sequence
  Artifcially synthesized peptide
SVPGVRLLQDSVD

SEQ ID NO: 3556 - protein, 11 aa, Artificial Sequence
  Artifcially synthesized peptide
SVQSDQGYISR

SEQ ID NO: 3557 - protein, 9 aa, Artificial Sequence
  Artifcially synthesized peptide
SVRRSVLMK

SEQ ID NO: 3558 - protein, 9 aa, Artificial Sequence
  Artifcially synthesized peptide
SVRRSVLMY

SEQ ID NO: 3559 - protein, 9 aa, Artificial Sequence
  Artifcially synthesized peptide
SVRSLSLSL

SEQ ID NO: 3560 - protein, 9 aa, Artificial Sequence
  Artifcially synthesized peptide
SVRSPTPYK

SEQ ID NO: 3561 - protein, 10 aa, Artificial Sequence
  Artifcially synthesized peptide
SVSRSPVPEK

SEQ ID NO: 3562 - protein, 9 aa, Artificial Sequence
  Artifcially synthesized peptide
SVSSLEVHF

SEQ ID NO: 3563 - protein, 8 aa, Artificial Sequence
  Artifcially synthesized peptide
SVSSSSYR

SEQ ID NO: 3564 - protein, 9 aa, Artificial Sequence
  Artifcially synthesized peptide
SVTSPIKMK

SEQ ID NO: 3565 - protein, 12 aa, Artificial Sequence
  Artifcially synthesized peptide
SVYSGDFGNLEV

SEQ ID NO: 3566 - protein, 9 aa, Artificial Sequence
  Artifcially synthesized peptide
SVYSPVKKK

SEQ ID NO: 3567 - protein, 9 aa, Artificial Sequence
  Artifcially synthesized peptide
SVYSPVKKY

SEQ ID NO: 3568 - protein, 9 aa, Artificial Sequence
  Artifcially synthesized peptide
SYIEHIFEI

SEQ ID NO: 3569 - protein, 9 aa, Artificial Sequence
  Artifcially synthesized peptide
SYMGHFDLL

SEQ ID NO: 3570 - protein, 10 aa, Artificial Sequence
  Artifcially synthesized peptide
SYPSPVATSY

SEQ ID NO: 3571 - protein, 10 aa, Artificial Sequence
  Artifcially synthesized peptide
SYPSPVPTSF

SEQ ID NO: 3572 - protein, 9 aa, Artificial Sequence
  Artifcially synthesized peptide
SYQKVIELF

SEQ ID NO: 3573 - protein, 11 aa, Artificial Sequence
  Artifcially synthesized peptide
SYSFSSSSIGH

SEQ ID NO: 3574 - protein, 13 aa, Artificial Sequence
  Artifcially synthesized peptide
SYSYSFSSSSIGH

SEQ ID NO: 3575 - protein, 9 aa, Artificial Sequence
  Artifcially synthesized peptide
SYYSLPRSF

SEQ ID NO: 3576 - protein, 9 aa, Artificial Sequence
  Artifcially synthesized peptide
SYYSPSIGF

SEQ ID NO: 3577 - protein, 11 aa, Artificial Sequence
  Artifcially synthesized peptide
SYYSPSIGFSY

SEQ ID NO: 3578 - protein, 9 aa, Artificial Sequence
  Artifcially synthesized peptide
TAISPPLSV

SEQ ID NO: 3579 - protein, 12 aa, Artificial Sequence
  Artifcially synthesized peptide
TAPLVPPLSPQY

SEQ ID NO: 3580 - protein, 9 aa, Artificial Sequence
  Artifcially synthesized peptide
TASPVAVSL

SEQ ID NO: 3581 - protein, 9 aa, Artificial Sequence
  Artifcially synthesized peptide
TATSPLTSY

SEQ ID NO: 3582 - protein, 8 aa, Artificial Sequence
  Artifcially synthesized peptide
TDKYSKMM

SEQ ID NO: 3583 - protein, 9 aa, Artificial Sequence
  Artifcially synthesized peptide
TEASPESML

SEQ ID NO: 3584 - protein, 9 aa, Artificial Sequence
  Artifcially synthesized peptide
TEDSNLRLF

SEQ ID NO: 3585 - protein, 9 aa, Artificial Sequence
  Artifcially synthesized peptide
TELPKRLSL

SEQ ID NO: 3586 - protein, 12 aa, Artificial Sequence
  Artifcially synthesized peptide
TEPLPEKTQESL

SEQ ID NO: 3587 - protein, 13 aa, Artificial Sequence
  Artifcially synthesized peptide
TESSPGSRQIQLW

SEQ ID NO: 3588 - protein, 20 aa, Artificial Sequence
  Artifcially synthesized peptide
THKGEIRGASTPFQFRASSP

SEQ ID NO: 3589 - protein, 8 aa, Artificial Sequence
  Artifcially synthesized peptide
THSLLLLL

SEQ ID NO: 3590 - protein, 15 aa, Artificial Sequence
  Artifcially synthesized peptide
TIGEKKEPSDKSVDS

SEQ ID NO: 3591 - protein, 9 aa, Artificial Sequence
  Artifcially synthesized peptide
TIRSPTTVL

SEQ ID NO: 3592 - protein, 11 aa, Artificial Sequence
  Artifcially synthesized peptide
TITPPDRYDSL

SEQ ID NO: 3593 - protein, 18 aa, Artificial Sequence
  Artifcially synthesized peptide
TKDKYMASRGQKAKSMEG

SEQ ID NO: 3594 - protein, 14 aa, Artificial Sequence
  Artifcially synthesized peptide
TKSVKALSSLHGDD

SEQ ID NO: 3595 - protein, 15 aa, Artificial Sequence
  Artifcially synthesized peptide
TKSVKALSSLHGDDQ

SEQ ID NO: 3596 - protein, 16 aa, Artificial Sequence
  Artifcially synthesized peptide
TKSVKALSSLHGDDQD

SEQ ID NO: 3597 - protein, 9 aa, Artificial Sequence
  Artifcially synthesized peptide
TLASPSVFK

SEQ ID NO: 3598 - protein, 11 aa, Artificial Sequence
  Artifcially synthesized peptide
TLASPSVFKST

SEQ ID NO: 3599 - protein, 11 aa, Artificial Sequence
  Artifcially synthesized peptide
TLASPSVFKSV

SEQ ID NO: 3600 - protein, 10 aa, Artificial Sequence
  Artifcially synthesized peptide
TLDSLDFARY

SEQ ID NO: 3601 - protein, 11 aa, Artificial Sequence
  Artifcially synthesized peptide
TLESTTVGTSV

SEQ ID NO: 3602 - protein, 9 aa, Artificial Sequence
  Artifcially synthesized peptide
TLLASPMLK

SEQ ID NO: 3603 - protein, 10 aa, Artificial Sequence
  Artifcially synthesized peptide
TLLSPSSIKV

SEQ ID NO: 3604 - protein, 9 aa, Artificial Sequence
  Artifcially synthesized peptide
TLMERTVSL

SEQ ID NO: 3605 - protein, 9 aa, Artificial Sequence
  Artifcially synthesized peptide
TLSSIRHMI

SEQ ID NO: 3606 - protein, 9 aa, Artificial Sequence
  Artifcially synthesized peptide
TLSSPPPGL

SEQ ID NO: 3607 - protein, 10 aa, Artificial Sequence
  Artifcially synthesized peptide
TMASPGKDNY

SEQ ID NO: 3608 - protein, 11 aa, Artificial Sequence
  Artifcially synthesized peptide
TMASPSVFKST

SEQ ID NO: 3609 - protein, 11 aa, Artificial Sequence
  Artifcially synthesized peptide
TMASPSVFKSV

SEQ ID NO: 3610 - protein, 10 aa, Artificial Sequence
  Artifcially synthesized peptide
TMDSPGKDNY

SEQ ID NO: 3611 - protein, 10 aa, Artificial Sequence
  Artifcially synthesized peptide
TMESPGKDNY

SEQ ID NO: 3612 - protein, 9 aa, Artificial Sequence
  Artifcially synthesized peptide
TMFLRETSL

SEQ ID NO: 3613 - protein, 9 aa, Artificial Sequence
  Artifcially synthesized peptide
TMMSPSQFL

SEQ ID NO: 3614 - protein, 10 aa, Artificial Sequence
  Artifcially synthesized peptide
TPAPSRTASF

SEQ ID NO: 3615 - protein, 10 aa, Artificial Sequence
  Artifcially synthesized peptide
TPAQPQRRSF

SEQ ID NO: 3616 - protein, 10 aa, Artificial Sequence
  Artifcially synthesized peptide
TPAQPQRRSL

SEQ ID NO: 3617 - protein, 10 aa, Artificial Sequence
  Artifcially synthesized peptide
TPAQPQRRSM

SEQ ID NO: 3618 - protein, 10 aa, Artificial Sequence
  Artifcially synthesized peptide
TPAQPQRRSV

SEQ ID NO: 3619 - protein, 9 aa, Artificial Sequence
  Artifcially synthesized peptide
TPASPNREL

SEQ ID NO: 3620 - protein, 10 aa, Artificial Sequence
  Artifcially synthesized peptide
TPASSRAQTL

SEQ ID NO: 3621 - protein, 9 aa, Artificial Sequence
  Artifcially synthesized peptide
TPASSSSAL

SEQ ID NO: 3622 - protein, 9 aa, Artificial Sequence
  Artifcially synthesized peptide
TPATPTSQF

SEQ ID NO: 3623 - protein, 19 aa, Artificial Sequence
  Artifcially synthesized peptide
TPDPSKFFSQLSSEHGGDV

SEQ ID NO: 3624 - protein, 20 aa, Artificial Sequence
  Artifcially synthesized peptide
TPDPSKFFSQLSSEHGGDVQ

SEQ ID NO: 3625 - protein, 9 aa, Artificial Sequence
  Artifcially synthesized peptide
TPHTPKSLL

SEQ ID NO: 3626 - protein, 11 aa, Artificial Sequence
  Artifcially synthesized peptide
TPISPGRASGF

SEQ ID NO: 3627 - protein, 11 aa, Artificial Sequence
  Artifcially synthesized peptide
TPISPGRASGM

SEQ ID NO: 3628 - protein, 14 aa, Artificial Sequence
  Artifcially synthesized peptide
TPISPGRASGMTTL

SEQ ID NO: 3629 - protein, 11 aa, Artificial Sequence
  Artifcially synthesized peptide
TPISPGRASGV

SEQ ID NO: 3630 - protein, 10 aa, Artificial Sequence
  Artifcially synthesized peptide
TPISPLKTGV

SEQ ID NO: 3631 - protein, 9 aa, Artificial Sequence
  Artifcially synthesized peptide
TPISQAQKL

SEQ ID NO: 3632 - protein, 10 aa, Artificial Sequence
  Artifcially synthesized peptide
TPKSPGASNF

SEQ ID NO: 3633 - protein, 9 aa, Artificial Sequence
  Artifcially synthesized peptide
TPMKKHLSL

SEQ ID NO: 3634 - protein, 10 aa, Artificial Sequence
  Artifcially synthesized peptide
TPPPPPDTPP

SEQ ID NO: 3635 - protein, 12 aa, Artificial Sequence
  Artifcially synthesized peptide
TPPSSEKLVSVM

SEQ ID NO: 3636 - protein, 11 aa, Artificial Sequence
  Artifcially synthesized peptide
TPQPSRPVSPA

SEQ ID NO: 3637 - protein, 12 aa, Artificial Sequence
  Artifcially synthesized peptide
TPQPSRPVSPAG

SEQ ID NO: 3638 - protein, 11 aa, Artificial Sequence
  Artifcially synthesized peptide
TPRPASPGPSL

SEQ ID NO: 3639 - protein, 9 aa, Artificial Sequence
  Artifcially synthesized peptide
TPRSPPLGF

SEQ ID NO: 3640 - protein, 9 aa, Artificial Sequence
  Artifcially synthesized peptide
TPRSPPLGL

SEQ ID NO: 3641 - protein, 10 aa, Artificial Sequence
  Artifcially synthesized peptide
TPRSPPLGLF

SEQ ID NO: 3642 - protein, 10 aa, Artificial Sequence
  Artifcially synthesized peptide
TPRSPPLGLI

SEQ ID NO: 3643 - protein, 10 aa, Artificial Sequence
  Artifcially synthesized peptide
TPRSPPLGLL

SEQ ID NO: 3644 - protein, 10 aa, Artificial Sequence
  Artifcially synthesized peptide
TPRSPPLGLM

SEQ ID NO: 3645 - protein, 10 aa, Artificial Sequence
  Artifcially synthesized peptide
TPRSPPLGLV

SEQ ID NO: 3646 - protein, 9 aa, Artificial Sequence
  Artifcially synthesized peptide
TPRSPPLGM

SEQ ID NO: 3647 - protein, 9 aa, Artificial Sequence
  Artifcially synthesized peptide
TPRSPPLGV

SEQ ID NO: 3648 - protein, 10 aa, Artificial Sequence
  Artifcially synthesized peptide
TPRTPRTPQL

SEQ ID NO: 3649 - protein, 9 aa, Artificial Sequence
  Artifcially synthesized peptide
TPSPARPAL

SEQ ID NO: 3650 - protein, 9 aa, Artificial Sequence
  Artifcially synthesized peptide
TPSSFDTHF

SEQ ID NO: 3651 - protein, 9 aa, Artificial Sequence
  Artifcially synthesized peptide
TPSSREGTL

SEQ ID NO: 3652 - protein, 9 aa, Artificial Sequence
  Artifcially synthesized peptide
TPVSPGSTF

SEQ ID NO: 3653 - protein, 9 aa, Artificial Sequence
  Artifcially synthesized peptide
TPVSPRLHV

SEQ ID NO: 3654 - protein, 9 aa, Artificial Sequence
  Artifcially synthesized peptide
TPVSPTASM

SEQ ID NO: 3655 - protein, 8 aa, Artificial Sequence
  Artifcially synthesized peptide
TPVSPVKF

SEQ ID NO: 3656 - protein, 9 aa, Artificial Sequence
  Artifcially synthesized peptide
TPVSSANMM

SEQ ID NO: 3657 - protein, 9 aa, Artificial Sequence
  Artifcially synthesized peptide
TRDSLLIHL

SEQ ID NO: 3658 - protein, 9 aa, Artificial Sequence
  Artifcially synthesized peptide
TRKTPESFL

SEQ ID NO: 3659 - protein, 11 aa, Artificial Sequence
  Artifcially synthesized peptide
TRLSPAKIVLF

SEQ ID NO: 3660 - protein, 11 aa, Artificial Sequence
  Artifcially synthesized peptide
TRLSPAKIVLK

SEQ ID NO: 3661 - protein, 11 aa, Artificial Sequence
  Artifcially synthesized peptide
TRLSPAKIVLR

SEQ ID NO: 3662 - protein, 11 aa, Artificial Sequence
  Artifcially synthesized peptide
TRLSPAKIVLY

SEQ ID NO: 3663 - protein, 8 aa, Artificial Sequence
  Artifcially synthesized peptide
TRLSPLEL

SEQ ID NO: 3664 - protein, 9 aa, Artificial Sequence
  Artifcially synthesized peptide
TRMSTVSEL

SEQ ID NO: 3665 - protein, 9 aa, Artificial Sequence
  Artifcially synthesized peptide
TRSSAVRLR

SEQ ID NO: 3666 - protein, 9 aa, Artificial Sequence
  Artifcially synthesized peptide
TRSSPVRKL

SEQ ID NO: 3667 - protein, 9 aa, Artificial Sequence
  Artifcially synthesized peptide
TRYPTILQL

SEQ ID NO: 3668 - protein, 10 aa, Artificial Sequence
  Artifcially synthesized peptide
TSASPGKDNY

SEQ ID NO: 3669 - protein, 10 aa, Artificial Sequence
  Artifcially synthesized peptide
TSDSPGKDNY

SEQ ID NO: 3670 - protein, 10 aa, Artificial Sequence
  Artifcially synthesized peptide
TSDSPPHNDI

SEQ ID NO: 3671 - protein, 11 aa, Artificial Sequence
  Artifcially synthesized peptide
TSDTPDYLLKY

SEQ ID NO: 3672 - protein, 10 aa, Artificial Sequence
  Artifcially synthesized peptide
TSESPGKDNY

SEQ ID NO: 3673 - protein, 11 aa, Artificial Sequence
  Artifcially synthesized peptide
TSETPDYLLKY

SEQ ID NO: 3674 - protein, 7 aa, Artificial Sequence
  Artifcially synthesized peptide
TSFADEL

SEQ ID NO: 3675 - protein, 15 aa, Artificial Sequence
  Artifcially synthesized peptide
TSFSVGSDDELGPIR

SEQ ID NO: 3676 - protein, 13 aa, Artificial Sequence
  Artifcially synthesized peptide
TSGPGSRISSSSF

SEQ ID NO: 3677 - protein, 9 aa, Artificial Sequence
  Artifcially synthesized peptide
TSISPALAR

SEQ ID NO: 3678 - protein, 11 aa, Artificial Sequence
  Artifcially synthesized peptide
TSISPSRHGAL

SEQ ID NO: 3679 - protein, 9 aa, Artificial Sequence
  Artifcially synthesized peptide
TSPSYIDKL

SEQ ID NO: 3680 - protein, 9 aa, Artificial Sequence
  Artifcially synthesized peptide
TSVSPAPDK

SEQ ID NO: 3681 - protein, 10 aa, Artificial Sequence
  Artifcially synthesized peptide
TTASPGKDNY

SEQ ID NO: 3682 - protein, 10 aa, Artificial Sequence
  Artifcially synthesized peptide
TTASPGKDNY

SEQ ID NO: 3683 - protein, 11 aa, Artificial Sequence
  Artifcially synthesized peptide
TTDPLIRWDSY

SEQ ID NO: 3684 - protein, 10 aa, Artificial Sequence
  Artifcially synthesized peptide
TTDSPGKDNY

SEQ ID NO: 3685 - protein, 11 aa, Artificial Sequence
  Artifcially synthesized peptide
TTDTPDYLLKY

SEQ ID NO: 3686 - protein, 10 aa, Artificial Sequence
  Artifcially synthesized peptide
TTESPGKDNY

SEQ ID NO: 3687 - protein, 11 aa, Artificial Sequence
  Artifcially synthesized peptide
TTETPDYLLKY

SEQ ID NO: 3688 - protein, 13 aa, Artificial Sequence
  Artifcially synthesized peptide
TTKSVKALSSLHG

SEQ ID NO: 3689 - protein, 15 aa, Artificial Sequence
  Artifcially synthesized peptide
TTKSVKALSSLHGDD

SEQ ID NO: 3690 - protein, 16 aa, Artificial Sequence
  Artifcially synthesized peptide
TTKSVKALSSLHGDDQ

SEQ ID NO: 3691 - protein, 17 aa, Artificial Sequence
  Artifcially synthesized peptide
TTKSVKALSSLHGDDQD

SEQ ID NO: 3692 - protein, 18 aa, Artificial Sequence
  Artifcially synthesized peptide
TTKSVKALSSLHGDDQDS

SEQ ID NO: 3693 - protein, 20 aa, Artificial Sequence
  Artifcially synthesized peptide
TTKSVKALSSLHGDDQDSED

SEQ ID NO: 3694 - protein, 21 aa, Artificial Sequence
  Artifcially synthesized peptide
TTKSVKALSSLHGDDQDSEDE

SEQ ID NO: 3695 - protein, 9 aa, Artificial Sequence
  Artifcially synthesized peptide
TVDSPPWQL

SEQ ID NO: 3696 - protein, 10 aa, Artificial Sequence
  Artifcially synthesized peptide
TVFSPTLPAA

SEQ ID NO: 3697 - protein, 11 aa, Artificial Sequence
  Artifcially synthesized peptide
TVFSPTLPAAR

SEQ ID NO: 3698 - protein, 9 aa, Artificial Sequence
  Artifcially synthesized peptide
TVKQKYLSF

SEQ ID NO: 3699 - protein, 11 aa, Artificial Sequence
  Artifcially synthesized peptide
TVMSNSSVIHL

SEQ ID NO: 3700 - protein, 9 aa, Artificial Sequence
  Artifcially synthesized peptide
TVNSPAIYK

SEQ ID NO: 3701 - protein, 10 aa, Artificial Sequence
  Artifcially synthesized peptide
TVNSPAIYKF

SEQ ID NO: 3702 - protein, 9 aa, Artificial Sequence
  Artifcially synthesized peptide
TVTPVPPPQ

SEQ ID NO: 3703 - protein, 12 aa, Artificial Sequence
  Artifcially synthesized peptide
TVYSSEEAELLK

SEQ ID NO: 3704 - protein, 9 aa, Artificial Sequence
  Artifcially synthesized peptide
TYEGIFKTL

SEQ ID NO: 3705 - protein, 10 aa, Artificial Sequence
  Artifcially synthesized peptide
VADSPAEVAL

SEQ ID NO: 3706 - protein, 11 aa, Artificial Sequence
  Artifcially synthesized peptide
VADSPRDTASL

SEQ ID NO: 3707 - protein, 9 aa, Artificial Sequence
  Artifcially synthesized peptide
VADTSIQKL

SEQ ID NO: 3708 - protein, 7 aa, Artificial Sequence
  Artifcially synthesized peptide
VAKRLSL

SEQ ID NO: 3709 - protein, 27 aa, Artificial Sequence
  Artifcially synthesized peptide
VAMPVKKSPRRSSSDEQGLSYSSLKNV

SEQ ID NO: 3710 - protein, 9 aa, Artificial Sequence
  Artifcially synthesized peptide
VEFPHSPEI

SEQ ID NO: 3711 - protein, 10 aa, Artificial Sequence
  Artifcially synthesized peptide
VEKLPDSPAL

SEQ ID NO: 3712 - protein, 7 aa, Artificial Sequence
  Artifcially synthesized peptide
VELSPAR

SEQ ID NO: 3713 - protein, 9 aa, Artificial Sequence
  Artifcially synthesized peptide
VELSPARSW

SEQ ID NO: 3714 - protein, 10 aa, Artificial Sequence
  Artifcially synthesized peptide
VETSFRKLSF

SEQ ID NO: 3715 - protein, 11 aa, Artificial Sequence
  Artifcially synthesized peptide
VGSDDELGPIR

SEQ ID NO: 3716 - protein, 10 aa, Artificial Sequence
  Artifcially synthesized peptide
VIDSQELSKV

SEQ ID NO: 3717 - protein, 9 aa, Artificial Sequence
  Artifcially synthesized peptide
VIMSIRTKL

SEQ ID NO: 3718 - protein, 11 aa, Artificial Sequence
  Artifcially synthesized peptide
VISDGGDSEQF

SEQ ID NO: 3719 - protein, 10 aa, Artificial Sequence
  Artifcially synthesized peptide
VLASPLKTGR

SEQ ID NO: 3720 - protein, 9 aa, Artificial Sequence
  Artifcially synthesized peptide
VLDSPASKK

SEQ ID NO: 3721 - protein, 11 aa, Artificial Sequence
  Artifcially synthesized peptide
VLEKSPGKLLV

SEQ ID NO: 3722 - protein, 10 aa, Artificial Sequence
  Artifcially synthesized peptide
VLFPESPARA

SEQ ID NO: 3723 - protein, 10 aa, Artificial Sequence
  Artifcially synthesized peptide
VLFRTPLASV

SEQ ID NO: 3724 - protein, 9 aa, Artificial Sequence
  Artifcially synthesized peptide
VLFSSPPQM

SEQ ID NO: 3725 - protein, 9 aa, Artificial Sequence
  Artifcially synthesized peptide
VLIENVASL

SEQ ID NO: 3726 - protein, 9 aa, Artificial Sequence
  Artifcially synthesized peptide
VLIGSPKKV

SEQ ID NO: 3727 - protein, 9 aa, Artificial Sequence
  Artifcially synthesized peptide
VLIGSPKKY

SEQ ID NO: 3728 - protein, 10 aa, Artificial Sequence
  Artifcially synthesized peptide
VLKGSRSSEL

SEQ ID NO: 3729 - protein, 10 aa, Artificial Sequence
  Artifcially synthesized peptide
VLKGSRSSEV

SEQ ID NO: 3730 - protein, 12 aa, Artificial Sequence
  Artifcially synthesized peptide
VLKSRKSSVTEE

SEQ ID NO: 3731 - protein, 10 aa, Artificial Sequence
  Artifcially synthesized peptide
VLKVMIGSPK

SEQ ID NO: 3732 - protein, 11 aa, Artificial Sequence
  Artifcially synthesized peptide
VLKVMIGSPKK

SEQ ID NO: 3733 - protein, 12 aa, Artificial Sequence
  Artifcially synthesized peptide
VLKVMIGSPKKK

SEQ ID NO: 3734 - protein, 9 aa, Artificial Sequence
  Artifcially synthesized peptide
VLLSPVPEL

SEQ ID NO: 3735 - protein, 9 aa, Artificial Sequence
  Artifcially synthesized peptide
VLLSPVPEV

SEQ ID NO: 3736 - protein, 10 aa, Artificial Sequence
  Artifcially synthesized peptide
VLMKSPSPAL

SEQ ID NO: 3737 - protein, 10 aa, Artificial Sequence
  Artifcially synthesized peptide
VLMKSPSPAV

SEQ ID NO: 3738 - protein, 9 aa, Artificial Sequence
  Artifcially synthesized peptide
VLQTPPYVK

SEQ ID NO: 3739 - protein, 10 aa, Artificial Sequence
  Artifcially synthesized peptide
VLQTPPYVKK

SEQ ID NO: 3740 - protein, 10 aa, Artificial Sequence
  Artifcially synthesized peptide
VLQTPPYVKY

SEQ ID NO: 3741 - protein, 9 aa, Artificial Sequence
  Artifcially synthesized peptide
VLSDVIPSI

SEQ ID NO: 3742 - protein, 10 aa, Artificial Sequence
  Artifcially synthesized peptide
VLSSLTPAKV

SEQ ID NO: 3743 - protein, 9 aa, Artificial Sequence
  Artifcially synthesized peptide
VLTSNVQTI

SEQ ID NO: 3744 - protein, 9 aa, Artificial Sequence
  Artifcially synthesized peptide
VLYSPQMAL

SEQ ID NO: 3745 - protein, 8 aa, Artificial Sequence
  Artifcially synthesized peptide
VMDSPVHL

SEQ ID NO: 3746 - protein, 10 aa, Artificial Sequence
  Artifcially synthesized peptide
VMFPGNSPSY

SEQ ID NO: 3747 - protein, 10 aa, Artificial Sequence
  Artifcially synthesized peptide
VMFRTPLASV

SEQ ID NO: 3748 - protein, 9 aa, Artificial Sequence
  Artifcially synthesized peptide
VMIGSPKKV

SEQ ID NO: 3749 - protein, 9 aa, Artificial Sequence
  Artifcially synthesized peptide
VMIGSPKKY

SEQ ID NO: 3750 - protein, 10 aa, Artificial Sequence
  Artifcially synthesized peptide
VMKVMIGSPK

SEQ ID NO: 3751 - protein, 11 aa, Artificial Sequence
  Artifcially synthesized peptide
VMKVMIGSPKK

SEQ ID NO: 3752 - protein, 12 aa, Artificial Sequence
  Artifcially synthesized peptide
VMKVMIGSPKKK

SEQ ID NO: 3753 - protein, 12 aa, Artificial Sequence
  Artifcially synthesized peptide
VMKVMIGSPKKY

SEQ ID NO: 3754 - protein, 9 aa, Artificial Sequence
  Artifcially synthesized peptide
VMLSPVPEL

SEQ ID NO: 3755 - protein, 9 aa, Artificial Sequence
  Artifcially synthesized peptide
VMLSPVPEV

SEQ ID NO: 3756 - protein, 9 aa, Artificial Sequence
  Artifcially synthesized peptide
VMQSPLVGV

SEQ ID NO: 3757 - protein, 9 aa, Artificial Sequence
  Artifcially synthesized peptide
VMQTPPYVK

SEQ ID NO: 3758 - protein, 10 aa, Artificial Sequence
  Artifcially synthesized peptide
VMQTPPYVKK

SEQ ID NO: 3759 - protein, 9 aa, Artificial Sequence
  Artifcially synthesized peptide
VMTSLQQEY

SEQ ID NO: 3760 - protein, 9 aa, Artificial Sequence
  Artifcially synthesized peptide
VPASSTSTL

SEQ ID NO: 3761 - protein, 10 aa, Artificial Sequence
  Artifcially synthesized peptide
VPATHGQVTY

SEQ ID NO: 3762 - protein, 12 aa, Artificial Sequence
  Artifcially synthesized peptide
VPGVRLLQDSVD

SEQ ID NO: 3763 - protein, 13 aa, Artificial Sequence
  Artifcially synthesized peptide
VPHHGFEDWSQIR

SEQ ID NO: 3764 - protein, 9 aa, Artificial Sequence
  Artifcially synthesized peptide
VPKKPPPSP

SEQ ID NO: 3765 - protein, 10 aa, Artificial Sequence
  Artifcially synthesized peptide
VPKSGRSSSL

SEQ ID NO: 3766 - protein, 9 aa, Artificial Sequence
  Artifcially synthesized peptide
VPKSPAFAL

SEQ ID NO: 3767 - protein, 9 aa, Artificial Sequence
  Artifcially synthesized peptide
VPLIRKKSL

SEQ ID NO: 3768 - protein, 10 aa, Artificial Sequence
  Artifcially synthesized peptide
VPREVLRLSF

SEQ ID NO: 3769 - protein, 10 aa, Artificial Sequence
  Artifcially synthesized peptide
VPREVLRLSL

SEQ ID NO: 3770 - protein, 10 aa, Artificial Sequence
  Artifcially synthesized peptide
VPREVLRLSM

SEQ ID NO: 3771 - protein, 10 aa, Artificial Sequence
  Artifcially synthesized peptide
VPREVLRLSV

SEQ ID NO: 3772 - protein, 10 aa, Artificial Sequence
  Artifcially synthesized peptide
VPRPERRSSL

SEQ ID NO: 3773 - protein, 10 aa, Artificial Sequence
  Artifcially synthesized peptide
VPRPERRSSL

SEQ ID NO: 3774 - protein, 10 aa, Artificial Sequence
  Artifcially synthesized peptide
VPRPERRSSL

SEQ ID NO: 3775 - protein, 13 aa, Artificial Sequence
  Artifcially synthesized peptide
VPRSPKHAHSSSF

SEQ ID NO: 3776 - protein, 13 aa, Artificial Sequence
  Artifcially synthesized peptide
VPRSPKHAHSSSL

SEQ ID NO: 3777 - protein, 13 aa, Artificial Sequence
  Artifcially synthesized peptide
VPRSPKHAHSSSM

SEQ ID NO: 3778 - protein, 13 aa, Artificial Sequence
  Artifcially synthesized peptide
VPRSPKHAHSSSV

SEQ ID NO: 3779 - protein, 9 aa, Artificial Sequence
  Artifcially synthesized peptide
VPRSPVIKI

SEQ ID NO: 3780 - protein, 13 aa, Artificial Sequence
  Artifcially synthesized peptide
VPRTPSRERSSSA

SEQ ID NO: 3781 - protein, 9 aa, Artificial Sequence
  Artifcially synthesized peptide
VPRTPVGKF

SEQ ID NO: 3782 - protein, 9 aa, Artificial Sequence
  Artifcially synthesized peptide
VPSSPLRKA

SEQ ID NO: 3783 - protein, 10 aa, Artificial Sequence
  Artifcially synthesized peptide
VPTSPKGRLL

SEQ ID NO: 3784 - protein, 9 aa, Artificial Sequence
  Artifcially synthesized peptide
VPTSPKSSL

SEQ ID NO: 3785 - protein, 8 aa, Artificial Sequence
  Artifcially synthesized peptide
VPTTSSSL

SEQ ID NO: 3786 - protein, 9 aa, Artificial Sequence
  Artifcially synthesized peptide
VPVSGTQGL

SEQ ID NO: 3787 - protein, 9 aa, Artificial Sequence
  Artifcially synthesized peptide
VPVSNQSSL

SEQ ID NO: 3788 - protein, 9 aa, Artificial Sequence
  Artifcially synthesized peptide
VPVSPGQQL

SEQ ID NO: 3789 - protein, 9 aa, Artificial Sequence
  Artifcially synthesized peptide
VPVSSASEL

SEQ ID NO: 3790 - protein, 9 aa, Artificial Sequence
  Artifcially synthesized peptide
VPVSVGPSL

SEQ ID NO: 3791 - protein, 9 aa, Artificial Sequence
  Artifcially synthesized peptide
VRASKDLAQ

SEQ ID NO: 3792 - protein, 9 aa, Artificial Sequence
  Artifcially synthesized peptide
VRLLQDSVD

SEQ ID NO: 3793 - protein, 9 aa, Artificial Sequence
  Artifcially synthesized peptide
VRQSPGPAL

SEQ ID NO: 3794 - protein, 17 aa, Artificial Sequence
  Artifcially synthesized peptide
VRQSVTSFPDADAFHHQ

SEQ ID NO: 3795 - protein, 9 aa, Artificial Sequence
  Artifcially synthesized peptide
VRTPSVQSL

SEQ ID NO: 3796 - protein, 9 aa, Artificial Sequence
  Artifcially synthesized peptide
VRYSQLLGL

SEQ ID NO: 3797 - protein, 9 aa, Artificial Sequence
  Artifcially synthesized peptide
VSDSPSHIA

SEQ ID NO: 3798 - protein, 10 aa, Artificial Sequence
  Artifcially synthesized peptide
VSDSPSHIAT

SEQ ID NO: 3799 - protein, 12 aa, Artificial Sequence
  Artifcially synthesized peptide
VSKVMIGSPKKV

SEQ ID NO: 3800 - protein, 12 aa, Artificial Sequence
  Artifcially synthesized peptide
VSKVMIGSPKKY

SEQ ID NO: 3801 - protein, 7 aa, Artificial Sequence
  Artifcially synthesized peptide
VSPFQEL

SEQ ID NO: 3802 - protein, 22 aa, Artificial Sequence
  Artifcially synthesized peptide
VSPSKSPSLSPSPPSPLEKTPL

SEQ ID NO: 3803 - protein, 10 aa, Artificial Sequence
  Artifcially synthesized peptide
VSSPPPYTAY

SEQ ID NO: 3804 - protein, 14 aa, Artificial Sequence
  Artifcially synthesized peptide
VSSSDSPPRPQPAF

SEQ ID NO: 3805 - protein, 9 aa, Artificial Sequence
  Artifcially synthesized peptide
VSSSPRELL

SEQ ID NO: 3806 - protein, 9 aa, Artificial Sequence
  Artifcially synthesized peptide
VTKSSPRAL

SEQ ID NO: 3807 - protein, 10 aa, Artificial Sequence
  Artifcially synthesized peptide
VTQTPPYVKK

SEQ ID NO: 3808 - protein, 9 aa, Artificial Sequence
  Artifcially synthesized peptide
VTTPNRLIY

SEQ ID NO: 3809 - protein, 9 aa, Artificial Sequence
  Artifcially synthesized peptide
VTTPTGYKY

SEQ ID NO: 3810 - protein, 11 aa, Artificial Sequence
  Artifcially synthesized peptide
VTTSTRTYSLG

SEQ ID NO: 3811 - protein, 10 aa, Artificial Sequence
  Artifcially synthesized peptide
VVDSPGQEVL

SEQ ID NO: 3812 - protein, 11 aa, Artificial Sequence
  Artifcially synthesized peptide
VVSEVDIAKAD

SEQ ID NO: 3813 - protein, 10 aa, Artificial Sequence
  Artifcially synthesized peptide
VVSSPKLAPK

SEQ ID NO: 3814 - protein, 12 aa, Artificial Sequence
  Artifcially synthesized peptide
VYIPMSPGAHHF

SEQ ID NO: 3815 - protein, 9 aa, Artificial Sequence
  Artifcially synthesized peptide
VYLPTHTSL

SEQ ID NO: 3816 - protein, 10 aa, Artificial Sequence
  Artifcially synthesized peptide
VYLPTHTSLL

SEQ ID NO: 3817 - protein, 11 aa, Artificial Sequence
  Artifcially synthesized peptide
VYLPTHTSLLN

SEQ ID NO: 3818 - protein, 12 aa, Artificial Sequence
  Artifcially synthesized peptide
VYLPTHTSLLNL

SEQ ID NO: 3819 - protein, 13 aa, Artificial Sequence
  Artifcially synthesized peptide
VYLPTHTSLLNLT

SEQ ID NO: 3820 - protein, 9 aa, Artificial Sequence
  Artifcially synthesized peptide
VYTYIQSRF

SEQ ID NO: 3821 - protein, 9 aa, Artificial Sequence
  Artifcially synthesized peptide
WEFGKRDSL

SEQ ID NO: 3822 - protein, 9 aa, Artificial Sequence
  Artifcially synthesized peptide
WIGLNSLSF

SEQ ID NO: 3823 - protein, 12 aa, Artificial Sequence
  Artifcially synthesized peptide
WTHLSSKEVDPS

SEQ ID NO: 3824 - protein, 14 aa, Artificial Sequence
  Artifcially synthesized peptide
WTHLSSKEVDPSTG

SEQ ID NO: 3825 - protein, 9 aa, Artificial Sequence
  Artifcially synthesized peptide
YAFEGTGSL

SEQ ID NO: 3826 - protein, 9 aa, Artificial Sequence
  Artifcially synthesized peptide
YARSVHEEF

SEQ ID NO: 3827 - protein, 9 aa, Artificial Sequence
  Artifcially synthesized peptide
YASSKLLKI

SEQ ID NO: 3828 - protein, 9 aa, Artificial Sequence
  Artifcially synthesized peptide
YAVPRRGSL

SEQ ID NO: 3829 - protein, 9 aa, Artificial Sequence
  Artifcially synthesized peptide
YAYDGKDYI

SEQ ID NO: 3830 - protein, 11 aa, Artificial Sequence
  Artifcially synthesized peptide
YCISPSTAAQF

SEQ ID NO: 3831 - protein, 9 aa, Artificial Sequence
  Artifcially synthesized peptide
YEFSPVKML

SEQ ID NO: 3832 - protein, 8 aa, Artificial Sequence
  Artifcially synthesized peptide
YEGSPIKV

SEQ ID NO: 3833 - protein, 9 aa, Artificial Sequence
  Artifcially synthesized peptide
YEGSPIKVT

SEQ ID NO: 3834 - protein, 10 aa, Artificial Sequence
  Artifcially synthesized peptide
YEGSPIKVTL

SEQ ID NO: 3835 - protein, 10 aa, Artificial Sequence
  Artifcially synthesized peptide
YEGSPIKVTL

SEQ ID NO: 3836 - protein, 12 aa, Artificial Sequence
  Artifcially synthesized peptide
YEKLSAEQSPPP

SEQ ID NO: 3837 - protein, 9 aa, Artificial Sequence
  Artifcially synthesized peptide
YESPGKIFL

SEQ ID NO: 3838 - protein, 8 aa, Artificial Sequence
  Artifcially synthesized peptide
YFSPFRPY

SEQ ID NO: 3839 - protein, 8 aa, Artificial Sequence
  Artifcially synthesized peptide
YGDRTSTF

SEQ ID NO: 3840 - protein, 9 aa, Artificial Sequence
  Artifcially synthesized peptide
YGITSPISL

SEQ ID NO: 3841 - protein, 11 aa, Artificial Sequence
  Artifcially synthesized peptide
YHLSPRAFLHY

SEQ ID NO: 3842 - protein, 9 aa, Artificial Sequence
  Artifcially synthesized peptide
YIKTELISV

SEQ ID NO: 3843 - protein, 6 aa, Artificial Sequence
  Artifcially synthesized peptide
YIQSRF

SEQ ID NO: 3844 - protein, 9 aa, Artificial Sequence
  Artifcially synthesized peptide
YLASLEKKL

SEQ ID NO: 3845 - protein, 9 aa, Artificial Sequence
  Artifcially synthesized peptide
YLDSGIHSG

SEQ ID NO: 3846 - protein, 10 aa, Artificial Sequence
  Artifcially synthesized peptide
YLDSGIHSGA

SEQ ID NO: 3847 - protein, 10 aa, Artificial Sequence
  Artifcially synthesized peptide
YLDSGIHSGV

SEQ ID NO: 3848 - protein, 8 aa, Artificial Sequence
  Artifcially synthesized peptide
YLGLDVPV

SEQ ID NO: 3849 - protein, 11 aa, Artificial Sequence
  Artifcially synthesized peptide
YLGSISTLVTL

SEQ ID NO: 3850 - protein, 9 aa, Artificial Sequence
  Artifcially synthesized peptide
YLIHSPMSL

SEQ ID NO: 3851 - protein, 9 aa, Artificial Sequence
  Artifcially synthesized peptide
YLLSPLNTL

SEQ ID NO: 3852 - protein, 11 aa, Artificial Sequence
  Artifcially synthesized peptide
YLLSPTKLPSI

SEQ ID NO: 3853 - protein, 11 aa, Artificial Sequence
  Artifcially synthesized peptide
YLLSPTKLPSV

SEQ ID NO: 3854 - protein, 9 aa, Artificial Sequence
  Artifcially synthesized peptide
YLPSFFTKL

SEQ ID NO: 3855 - protein, 9 aa, Artificial Sequence
  Artifcially synthesized peptide
YLPTHTSLL

SEQ ID NO: 3856 - protein, 9 aa, Artificial Sequence
  Artifcially synthesized peptide
YLQSRYYRA

SEQ ID NO: 3857 - protein, 9 aa, Artificial Sequence
  Artifcially synthesized peptide
YLQSRYYRA

SEQ ID NO: 3858 - protein, 9 aa, Artificial Sequence
  Artifcially synthesized peptide
YLQSRYYRA

SEQ ID NO: 3859 - protein, 11 aa, Artificial Sequence
  Artifcially synthesized peptide
YLRSVGDGETV

SEQ ID NO: 3860 - protein, 11 aa, Artificial Sequence
  Artifcially synthesized peptide
YLSDSDTEAKL

SEQ ID NO: 3861 - protein, 11 aa, Artificial Sequence
  Artifcially synthesized peptide
YLVSPITGEKI

SEQ ID NO: 3862 - protein, 10 aa, Artificial Sequence
  Artifcially synthesized peptide
YMDSGIHSGA

SEQ ID NO: 3863 - protein, 10 aa, Artificial Sequence
  Artifcially synthesized peptide
YMDSGIHSGV

SEQ ID NO: 3864 - protein, 10 aa, Artificial Sequence
  Artifcially synthesized peptide
YPDPHSPFAV

SEQ ID NO: 3865 - protein, 9 aa, Artificial Sequence
  Artifcially synthesized peptide
YPGGRRSSL

SEQ ID NO: 3866 - protein, 9 aa, Artificial Sequence
  Artifcially synthesized peptide
YPHSPGSQY

SEQ ID NO: 3867 - protein, 11 aa, Artificial Sequence
  Artifcially synthesized peptide
YPLQISPVSSY

SEQ ID NO: 3868 - protein, 11 aa, Artificial Sequence
  Artifcially synthesized peptide
YPLSPAKVNQY

SEQ ID NO: 3869 - protein, 11 aa, Artificial Sequence
  Artifcially synthesized peptide
YPLSPTKISEY

SEQ ID NO: 3870 - protein, 11 aa, Artificial Sequence
  Artifcially synthesized peptide
YPLSPTKISQY

SEQ ID NO: 3871 - protein, 9 aa, Artificial Sequence
  Artifcially synthesized peptide
YPRLSIPNL

SEQ ID NO: 3872 - protein, 11 aa, Artificial Sequence
  Artifcially synthesized peptide
YPRSFDEVEGF

SEQ ID NO: 3873 - protein, 11 aa, Artificial Sequence
  Artifcially synthesized peptide
YPRSFDEVEGM

SEQ ID NO: 3874 - protein, 11 aa, Artificial Sequence
  Artifcially synthesized peptide
YPRSFDEVEGV

SEQ ID NO: 3875 - protein, 12 aa, Artificial Sequence
  Artifcially synthesized peptide
YPRSFDEVEGVF

SEQ ID NO: 3876 - protein, 12 aa, Artificial Sequence
  Artifcially synthesized peptide
YPRSFDEVEGVL

SEQ ID NO: 3877 - protein, 12 aa, Artificial Sequence
  Artifcially synthesized peptide
YPRSFDEVEGVM

SEQ ID NO: 3878 - protein, 12 aa, Artificial Sequence
  Artifcially synthesized peptide
YPRSFDEVEGVV

SEQ ID NO: 3879 - protein, 9 aa, Artificial Sequence
  Artifcially synthesized peptide
YPSFRRSSL

SEQ ID NO: 3880 - protein, 9 aa, Artificial Sequence
  Artifcially synthesized peptide
YPSSPRKAL

SEQ ID NO: 3881 - protein, 8 aa, Artificial Sequence
  Artifcially synthesized peptide
YPSSPRKF

SEQ ID NO: 3882 - protein, 8 aa, Artificial Sequence
  Artifcially synthesized peptide
YPSSPRKL

SEQ ID NO: 3883 - protein, 8 aa, Artificial Sequence
  Artifcially synthesized peptide
YPSSPRKM

SEQ ID NO: 3884 - protein, 8 aa, Artificial Sequence
  Artifcially synthesized peptide
YPSSPRKV

SEQ ID NO: 3885 - protein, 9 aa, Artificial Sequence
  Artifcially synthesized peptide
YPVSPKQKY

SEQ ID NO: 3886 - protein, 10 aa, Artificial Sequence
  Artifcially synthesized peptide
YPYEFSPVKM

SEQ ID NO: 3887 - protein, 11 aa, Artificial Sequence
  Artifcially synthesized peptide
YQLSPTKLPSI

SEQ ID NO: 3888 - protein, 11 aa, Artificial Sequence
  Artifcially synthesized peptide
YQLSPTKLPSV

SEQ ID NO: 3889 - protein, 10 aa, Artificial Sequence
  Artifcially synthesized peptide
YQRPFSPSAY

SEQ ID NO: 3890 - protein, 11 aa, Artificial Sequence
  Artifcially synthesized peptide
YQRSFDEVEGF

SEQ ID NO: 3891 - protein, 11 aa, Artificial Sequence
  Artifcially synthesized peptide
YQRSFDEVEGL

SEQ ID NO: 3892 - protein, 11 aa, Artificial Sequence
  Artifcially synthesized peptide
YQRSFDEVEGM

SEQ ID NO: 3893 - protein, 11 aa, Artificial Sequence
  Artifcially synthesized peptide
YQRSFDEVEGV

SEQ ID NO: 3894 - protein, 12 aa, Artificial Sequence
  Artifcially synthesized peptide
YQRSFDEVEGVF

SEQ ID NO: 3895 - protein, 12 aa, Artificial Sequence
  Artifcially synthesized peptide
YQRSFDEVEGVL

SEQ ID NO: 3896 - protein, 12 aa, Artificial Sequence
  Artifcially synthesized peptide
YQRSFDEVEGVM

SEQ ID NO: 3897 - protein, 12 aa, Artificial Sequence
  Artifcially synthesized peptide
YQRSFDEVEGVV

SEQ ID NO: 3898 - protein, 9 aa, Artificial Sequence
  Artifcially synthesized peptide
YRNDSSSSL

SEQ ID NO: 3899 - protein, 9 aa, Artificial Sequence
  Artifcially synthesized peptide
YRRSVPTWL

SEQ ID NO: 3900 - protein, 9 aa, Artificial Sequence
  Artifcially synthesized peptide
YRYSPQSFL

SEQ ID NO: 3901 - protein, 10 aa, Artificial Sequence
  Artifcially synthesized peptide
YSDRSSGGSY

SEQ ID NO: 3902 - protein, 10 aa, Artificial Sequence
  Artifcially synthesized peptide
YSESRSSLDY

SEQ ID NO: 3903 - protein, 9 aa, Artificial Sequence
  Artifcially synthesized peptide
YSFCGTVEY

SEQ ID NO: 3904 - protein, 9 aa, Artificial Sequence
  Artifcially synthesized peptide
YSFSPSKSY

SEQ ID NO: 3905 - protein, 10 aa, Artificial Sequence
  Artifcially synthesized peptide
YSFSSSSIGH

SEQ ID NO: 3906 - protein, 10 aa, Artificial Sequence
  Artifcially synthesized peptide
YSLDSPGPEK

SEQ ID NO: 3907 - protein, 11 aa, Artificial Sequence
  Artifcially synthesized peptide
YSLDSPGPEKM

SEQ ID NO: 3908 - protein, 13 aa, Artificial Sequence
  Artifcially synthesized peptide
YSLDSPGPEKMAL

SEQ ID NO: 3909 - protein, 9 aa, Artificial Sequence
  Artifcially synthesized peptide
YSLSPRPSY

SEQ ID NO: 3910 - protein, 9 aa, Artificial Sequence
  Artifcially synthesized peptide
YSLSPSKSY

SEQ ID NO: 3911 - protein, 11 aa, Artificial Sequence
  Artifcially synthesized peptide
YSLSPSKSYKY

SEQ ID NO: 3912 - protein, 8 aa, Artificial Sequence
  Artifcially synthesized peptide
YSSLVRVL

SEQ ID NO: 3913 - protein, 10 aa, Artificial Sequence
  Artifcially synthesized peptide
YSTTPGGTLY

SEQ ID NO: 3914 - protein, 9 aa, Artificial Sequence
  Artifcially synthesized peptide
YTAGTPYKV

SEQ ID NO: 3915 - protein, 10 aa, Artificial Sequence
  Artifcially synthesized peptide
YTDSESSASL

SEQ ID NO: 3916 - protein, 10 aa, Artificial Sequence
  Artifcially synthesized peptide
YTSSRDAFGY

SEQ ID NO: 3917 - protein, 8 aa, Artificial Sequence
  Artifcially synthesized peptide
YVDAETSL

SEQ ID NO: 3918 - protein, 9 aa, Artificial Sequence
  Artifcially synthesized peptide
YVKLTPVSL

SEQ ID NO: 3919 - protein, 9 aa, Artificial Sequence
  Artifcially synthesized peptide
YVPDSPALL

SEQ ID NO: 3920 - protein, 9 aa, Artificial Sequence
  Artifcially synthesized peptide
YVSSPDPQL

SEQ ID NO: 3921 - protein, 17 aa, Artificial Sequence
  Artifcially synthesized peptide
YYTAGSSSPTHAKSAHV

SEQ ID NO: 3922 - protein, 9 aa, Artificial Sequence
  Artifcially synthesized peptide
ETVSEQSNV

SEQ ID NO: 3923 - protein, 9 aa, Artificial Sequence
  Artifcially synthesized peptide
YLEPGPVTA

SEQ ID NO: 3924 - protein, 9 aa, Artificial Sequence
  Artifcially synthesized peptide
HLFGYSWYK

SEQ ID NO: 3925 - protein, 9 aa, Artificial Sequence
  Artifcially synthesized peptide
YLSGADLNL

SEQ ID NO: 3926 - protein, 9 aa, Artificial Sequence
  Artifcially synthesized peptide
EIWTHSYKV

SEQ ID NO: 3927 - protein, 9 aa, Artificial Sequence
  Artifcially synthesized peptide
ALLAVGATK

SEQ ID NO: 3928 - protein, 16 aa, Artificial Sequence
  Artifcially synthesized peptide
WNRQLYPEWTEAQRLD

SEQ ID NO: 3929 - protein, 9 aa, Artificial Sequence
  Artifcially synthesized peptide
ALNFPGSQK

SEQ ID NO: 3930 - protein, 9 aa, Artificial Sequence
  Artifcially synthesized peptide
SQNFPGSQK

SEQ ID NO: 3931 - protein, 9 aa, Artificial Sequence
  Artifcially synthesized peptide
KTWGQYWQV

SEQ ID NO: 3932 - protein, 9 aa, Artificial Sequence
  Artifcially synthesized peptide
ITDQVPFSV

SEQ ID NO: 3933 - protein, 9 aa, Artificial Sequence
  Artifcially synthesized peptide
IMDQVPFSV

SEQ ID NO: 3934 - protein, 9 aa, Artificial Sequence
  Artifcially synthesized peptide
YLEPGPVTA

SEQ ID NO: 3935 - protein, 10 aa, Artificial Sequence
  Artifcially synthesized peptide
VLYRYGSFSV

SEQ ID NO: 3936 - protein, 9 aa, Artificial Sequence
  Artifcially synthesized peptide
LIYRRRLMK

SEQ ID NO: 3937 - protein, 9 aa, Artificial Sequence
  Artifcially synthesized peptide
KIFGSLAFL

SEQ ID NO: 3938 - protein, 9 aa, Artificial Sequence
  Artifcially synthesized peptide
VLRENTSPK

SEQ ID NO: 3939 - protein, 14 aa, Artificial Sequence
  Artifcially synthesized peptide
LLKYRAREPVTKAE

SEQ ID NO: 3940 - protein, 9 aa, Artificial Sequence
  Artifcially synthesized peptide
SLFRAVITK

SEQ ID NO: 3941 - protein, 9 aa, Artificial Sequence
  Artifcially synthesized peptide
EADPTGHSY

SEQ ID NO: 3942 - protein, 9 aa, Artificial Sequence
  Artifcially synthesized peptide
EVDPIGHLY

SEQ ID NO: 3943 - protein, 15 aa, Artificial Sequence
  Artifcially synthesized peptide
TSYVKVLHHMVKISG

SEQ ID NO: 3944 - protein, 9 aa, Artificial Sequence
  Artifcially synthesized peptide
GLYDGMEHL

SEQ ID NO: 3945 - protein, 9 aa, Artificial Sequence
  Artifcially synthesized peptide
AAGIGILTV

SEQ ID NO: 3946 - protein, 23 aa, Artificial Sequence
  Artifcially synthesized peptide
RNGYRALMDKSLHVGTQCALTRR

SEQ ID NO: 3947 - protein, 20 aa, Artificial Sequence
  Artifcially synthesized peptide
VPNAPPAYEKLSAEQSPPPY

SEQ ID NO: 3948 - protein, 12 aa, Artificial Sequence
  Artifcially synthesized peptide
PNAPPAYEKLSA

SEQ ID NO: 3949 - protein, 12 aa, Artificial Sequence
  Artifcially synthesized peptide
NAPPAYEKLSAE

SEQ ID NO: 3950 - protein, 9 aa, Artificial Sequence
  Artifcially synthesized peptide
APPAYEKLS

SEQ ID NO: 3951 - protein, 12 aa, Artificial Sequence
  Artifcially synthesized peptide
APPAYEKLSAEQ

SEQ ID NO: 3952 - protein, 15 aa, Artificial Sequence
  Artifcially synthesized peptide
APPAYEKLSAEQSPP

SEQ ID NO: 3953 - protein, 16 aa, Artificial Sequence
  Artifcially synthesized peptide
APPAYEKLSAEQSPPP

SEQ ID NO: 3954 - protein, 17 aa, Artificial Sequence
  Artifcially synthesized peptide
APPAYEKLSAEQSPPPY

SEQ ID NO: 3955 - protein, 9 aa, Artificial Sequence
  Artifcially synthesized peptide
PPAYEKLSA

SEQ ID NO: 3956 - protein, 12 aa, Artificial Sequence
  Artifcially synthesized peptide
PPAYEKLSAEQS

SEQ ID NO: 3957 - protein, 9 aa, Artificial Sequence
  Artifcially synthesized peptide
PAYEKLSAE

SEQ ID NO: 3958 - protein, 12 aa, Artificial Sequence
  Artifcially synthesized peptide
PAYEKLSAEQSP

SEQ ID NO: 3959 - protein, 12 aa, Artificial Sequence
  Artifcially synthesized peptide
AYEKLSAEQSPP

SEQ ID NO: 3960 - protein, 12 aa, Artificial Sequence
  Artifcially synthesized peptide
YEKLSAEQSPPP

SEQ ID NO: 3961 - protein, 9 aa, Artificial Sequence
  Artifcially synthesized peptide
AAQERRVPR

SEQ ID NO: 3962 - protein, 9 aa, Artificial Sequence
  Artifcially synthesized peptide
LLGPGRPYR

SEQ ID NO: 3963 - protein, 10 aa, Artificial Sequence
  Artifcially synthesized peptide
ASGPGGGAPR

SEQ ID NO: 3964 - protein, 16 aa, Artificial Sequence
  Artifcially synthesized peptide
AQYIKANSKFIGITEL

SEQ ID NO: 3965 - protein, 9 aa, Artificial Sequence
  Artifcially synthesized peptide
RLSNRLLLR

SEQ ID NO: 3966 - protein, 16 aa, Artificial Sequence
  Artifcially synthesized peptide
AQNILLSNAPLGPQFP

SEQ ID NO: 3967 - protein, 11 aa, Artificial Sequence
  Artifcially synthesized peptide
SSDYVIPIGTY

SEQ ID NO: 3968 - protein, 13 aa, Artificial Sequence
  Artifcially synthesized peptide
SDAEKSDICTDEY

SEQ ID NO: 3969 - protein, 9 aa, Artificial Sequence
  Artifcially synthesized peptide
KCDICTDEY

SEQ ID NO: 3970 - protein, 9 aa, Artificial Sequence
  Artifcially synthesized peptide
YMDGTMSQV

SEQ ID NO: 3971 - protein, 21 aa, Artificial Sequence [sequence omitted]

SEQ ID NO: 3972 - protein, 15 aa, Artificial Sequence
  Artifcially synthesized peptide
QYIKANSKFIGITEL

SEQ ID NO: 3973 - protein, 16 aa, Artificial Sequence
  Artifcially synthesized peptide
AQYIKANSKFIGITEL

SEQ ID NO: 3974 - protein, 12 aa, Artificial Sequence
  Artifcially synthesized peptide
  misc_feature (3)..(3): Xaa can be any naturally occurring amino acid
AKXVAAWTLKAA

SEQ ID NO: 3975 - protein, 9 aa, Artificial Sequence
  Artifcially synthesized peptide
RRLSFSTRL

SEQ ID NO: 3976 - protein, 9 aa, Artificial Sequence
  Artifcially synthesized peptide
RRRSRVFDL

SEQ ID NO: 3977 - protein, 11 aa, Artificial Sequence
  Artifcially synthesized peptide
RSFSPKSPLEL

SEQ ID NO: 3978 - protein, 9 aa, Artificial Sequence
  Artifcially synthesized peptide
RSHSLHYLF

SEQ ID NO: 3979 - protein, 9 aa, Artificial Sequence
  Artifcially synthesized peptide
RSKSSIMYF

SEQ ID NO: 3980 - protein, 10 aa, Artificial Sequence
  Artifcially synthesized peptide
RSRSDNALHL

SEQ ID NO: 3981 - protein, 9 aa, Artificial Sequence
  Artifcially synthesized peptide
RSVSPTTEM

SEQ ID NO: 3982 - protein, 9 aa, Artificial Sequence
  Artifcially synthesized peptide
RSYSRLETL

SEQ ID NO: 3983 - protein, 10 aa, Artificial Sequence
  Artifcially synthesized peptide
RTLHSPPLQL

SEQ ID NO: 3984 - protein, 9 aa, Artificial Sequence
  Artifcially synthesized peptide
RVASPKLVM

SEQ ID NO: 3985 - protein, 14 aa, Artificial Sequence
  Artifcially synthesized peptide
SISVQVNSIKFDSE

SEQ ID NO: 3986 - protein, 10 aa, Artificial Sequence
  Artifcially synthesized peptide
SPFQSSPLSL

SEQ ID NO: 3987 - protein, 9 aa, Artificial Sequence
  Artifcially synthesized peptide
SPGSPLHSL

SEQ ID NO: 3988 - protein, 9 aa, Artificial Sequence
  Artifcially synthesized peptide
SPGSPLVSM

SEQ ID NO: 3989 - protein, 9 aa, Artificial Sequence
  Artifcially synthesized peptide
SPHTPSTHF

SEQ ID NO: 3990 - protein, 10 aa, Artificial Sequence
  Artifcially synthesized peptide
SPPNLTPKPL

SEQ ID NO: 3991 - protein, 10 aa, Artificial Sequence
  Artifcially synthesized peptide
SPRDSPAVSL

SEQ ID NO: 3992 - protein, 9 aa, Artificial Sequence
  Artifcially synthesized peptide
SPRSPGRSL

SEQ ID NO: 3993 - protein, 10 aa, Artificial Sequence
  Artifcially synthesized peptide
SPRSPQLSDF

SEQ ID NO: 3994 - protein, 9 aa, Artificial Sequence
  Artifcially synthesized peptide
STSSGRLLY

SEQ ID NO: 3995 - protein, 10 aa, Artificial Sequence
  Artifcially synthesized peptide
SVKSPEVQLL

SEQ ID NO: 3996 - protein, 8 aa, Artificial Sequence
  Artifcially synthesized peptide
TKSSPLKI

SEQ ID NO: 3997 - protein, 9 aa, Artificial Sequence
  Artifcially synthesized peptide
VLVVDTPSI

SEQ ID NO: 3998 - protein, 10 aa, Artificial Sequence
  Artifcially synthesized peptide
VPRPSTPSRL

SEQ ID NO: 3999 - protein, 15 aa, Artificial Sequence
  Artifcially synthesized peptide
YAQPQTTTPLPAVSG

SEQ ID NO: 4000 - protein, 11 aa, Artificial Sequence
  Artifcially synthesized peptide
YYPDPHSPFAV
